United States Patent Application Publication US 2025/0188405 A1 - sequence listing, part 2

SEQ ID NO: 1 - DNA, 4049986 bp, Cupriavidus necator (residues 2,024,994-4,049,986 of 4,049,986)
  source 1..4049986: mol_type = genomic DNA
gaggccggccgctggctcgatgccggcgagaccgtcgagaacgtgccgctggcgcccgagcagcgcgagtggctgcaggcctatgtcgaccagcactaccggcccgagcccaagcagcggcgccggcccgaatccttcaaggcgccggaagaccgcgcccgctactgatcctgacgacctgagcttgccctgccgatgagcgattcgtccttcctgtcgcgctggtcgcgccgcaaggccgcggtgcgggagggcgtgcccgtgccggcagaaccggcaccaccggcgcatgccgaagccgtccccgcggccaccggggcagcacccgaagcgccgcaagtaccggccccgacgctggaggacgtggccgcgctgcgccccggcgacgagatcgcccggttcgtggcccgcggcgtggatgagtcagtcaagcgcgcggcgctgaagacgctgttcgccgatccgcacttcaaggtcatggacgggctcgacatctatatcgacgactacagcaagcccgacccgatcccgccggagatcctgcgccagctgcgccagtccgagacactgggcctgttcgagccgaccgacgaggaacgcgcggcggcacaggccgcggccgccgccgcagggcctgtggatgtaccgccggcggcgcccgccgagttcgccgaatccggcgagaccgccgacactacggacatacccgcaccagtcgaaacgccgcagcaaactgtaagtcaaagcgcagaacagggcccgcaagacccggataaatgcgcgtagcctcacaggtgcagcgcagcctacaataggcatccccacaatccgccggcccgcagacccctcgccaagaaggacgtccggaccggtcagccgcattcgccatgccgacgctgatctgcaactgcaacgacaccatgccgcttgacggggcggcattgtccgaagcaaccaaggacgccaaccagggccccttgaaggtccatcgcctgctgtgccggcgcgagatcggcgacttcaccgccgcgctcgacggcaccgacgacgtcatcgtcgcctgcacccaggaacgccagctatttaccgaagtcgcggcgcaggccgcgcagggcagcgatggccgcccggtggtgaccgcgccggtgcgcttcgtcaatatccgcgagaccggcggctggtcacagggcgcccggcgcgaccccaagaccgccaatgccaagatcgccgcgctgctggccgtggcagcgctgcccgaacctgacccggtgccggtggtggattaccgttccgacggcgcggtgctggtgctgggcccggcccagcgggcgctgccgtgggccgagcggctggccgcgatgcagctggaggtcacggttctgctgaccggcagcgacatgcgtgaaggcgccgcggcgcagcctgcggcgcgcgcctatccggtccacagcggccggctggcctcgctgacaggctggctgggcgcgttcgaggccagctgggagaccggcgccggccgcagcaacccgatcgacctggacctgtgcacccgctgcaacgcctgcatcgacgcctgtcccgaggacgcgatcgacttcagctaccagatcgacctgtcgcgctgccgctcgcaccgtgcttgcgtgcgcgcctgcggcgccgccgcggcgatcgacttcgaccgcccgcagggcactgtgcagggacgcttcgacctggtcttcgacctgtgcgacacgcctgccttcaccatgcaccagccgccgcagggctatctgcacgctggcgccgatgccgcgcgccagcaggcccaggcgctgatgctggcggggctggtgggcgagttcgagaagcccaggttcttccgctacaaggaaaacctgtgcgcgcatggccgcaaccagaccaccggctgcaccgcctgcatcgacatctgctcgaccgaggccatcggctcgcgctggcacgacggcaaggggcgcatcgaggtcacgcccaacttgtgcatgggctgcggcgcgtgcaccaccgtgtgcccgagcggggccatcagctatggctacccggggccggaagtgaccggcgcgcgcctgcgcacgctgctgtcagcgtaccgccaggccggcgcgcgcgatccggtggtgctgctgcatggcgaggaatacggcacgcccgcgctgctggcactgggccgttccgcccgcggcggcaaggccaggggagtgcccgccaatgtgatgccgttgtcgctgttccacccggcctcggccgggctggagctatggctcgccgcgctgtgctggggcgccagccgcgtagcggtgctgctgaccggcgacgaggcaccgcagtaccgcaccgcgctgctggagcagatcgcggtcgggcgcgctctgctggccggcctgggctatgacggcgaggtactgtcgctggtcgaggccgccgatacgccggcgctggatgccggcctggcggcgctgcgcccgggccgcaacgcagtgccgccggcgccgttcggccccgtcgcggccaagcgcgagatgctggactttgtgctggatcacctggcgcggcacgcgccggtgcccgcgccaagcgtgccgctgccggccggcgcgccgatcggcgcgatcgcggtggatacgggcaagtgcaccatgtgcatggcctgcgtcggcgcgtgcccgtcgcaggcgctgcgcgacaatcccgagcgcccggtgctcagctttatcgagcgcaactgcgtgcagtgcgggctgtgcgagaagacctgcccggaagacgccatcagcctggtgccgcgcctgctggccggcgacgcagcgcgccgcccggtgaccctgaacgagacccagccgttccattgcatccgctgcgccaagccgttcggcacggcgcagatggtggagtcgatgctggtgcgcctggccggccatccggcctttgccggcgccgcggccgagcgcctgaagatgtgccctgactgccgcgtcatcgacatgatagagcgcgatacgggaaccgccaccggcgccacgctgcgctgacagcggccaggccacccaggacaaatcatcacgacatgacagatttccagccgatccagctcaccgccgcgccgcccgccgacgatgccgaagacaccgcccgcgccgacctctatggtctgcttgccacgctgttctaccacgcgcccgacgccgcgctgctgcaccacatcgccgccaaccgcgccgtgggcgaggacgcgaacaccgtgctgggcaaggcgtggaacgcattgtgcgatgcagcatcggagaccacggcggccgaggccgaggacgagtaccggcagctgttcgtgggcgtgggccgccaggatgtgttcctgtacggctccttctacatgaccggtttcctgaacgagcgcccgctggtggcgctgcgcgaagacctggcccgctacggcctggagcgccatgaagatgtcagcgaaaccgaggaccatatcgccacgctgtgcgaggtgatgcgcttcctggtggcgggcgacgacctggcggtgtccaacctgggcgagcagcagcgtttctatgcgcagcacctgcagccctgggtggagcgattgtgcgatgcagtgacgacgcacccgcaggcgcgtttctatcgcagcgtggcaggcttgctgggcgcgtttgccggcgtggaagcgatggcgctcgagatgcattgagcgggcggcattgaatatcggcgcgcttcgaggcttctttagcgcagcgggcccaaggcggccatttacacgaaaatgggttggaaagtagggaaaaacccgtgcatatcatggtctttcctgctagttgattctagaatatgcataacaacgcataacggctaaaaccatcgggcttggacagccgaggagcccccacatgacacagaagcaaaccagggtcgcgcgccgcacgtttctcgcgggcgctggagttgtggctgccgctacgggtgcggcagcgctgaccgcgcgcggtccggccatgccggaccaggccgcagctctgccggaacccaccgatcctccgtcggccagcaagggttaccgggtctctgaccacatccgcaagtactaccggaccacgctggtgtagctgccagggcggtgtggtctgccgcaccgcctgcaaccggacgcgacctgcgtccgcatctgaggtgagacatgatcttgacccgcaaacgcgcggcgcagggcgcatccgcccgcctcgctgacggcctggccaaccggcctgaacatgccggcgcagcctccggccgactctcgcagcggctcgcggccagcctggccggcgcgatgccgaccatggaccgccgcagcttcctcaagcgctctggcatcggcgtcggtgccgggctggcggcctcgcagctgacgctgatccgcaaggcggacgcagccgacgacaagaaggcggctgccgacggcaagaccggcatcgtggtcaggcgcaccgtgtgcggccactgctcggtcggctgcgcggtcgacgcggtggtgcagaacggcgtgtggatccgccaggagccggtgttcgattcgcccatcaacctgggcgcgcactgcgccaagggcgcggcgctgcgcgagcacggccacggcgaataccgcctcaagtacccgatgaagctggtcaacggcaagtaccagcgcatcagctgggaccaggcgctggacgagatcaccgcgaagatgaaggagatccgccagcagaccggcccggactcgatgttcttcgtcggctcgtccaagcacagcaacgagcaggcctacctgctgcgcaagtgggtgtcgttcttcggcaccaacaacaccgaccaccaggcgcgcatctgtcactcaaccaccgtggcgggcgtggcgaatacctggggatacggggcgatgaccaactcgtacaacgatatgcagaacgcgaaggcagcgctgtatatcggctccaacgcggccgaggcgcacccggtatcgatgctgcacctgctgcacgccaaggagaacggctgcaaggtgatcgtggtcgatccgcgctacacgcgcaccgcagccaaggcgcaacactacgtgcgcatccgctcgggtaccgacatcgcgttcctgttcggcatgctgtaccacatcttccagaacggctgggaagaccagaagtacctgcaggaccgcgtctacggcatggacaaggtcaaggaagaggtcatggccaagtggacgcccgacaaggtcgaggaagtctgcggcgtgcccgaggcgcaggtgaagatggtggccgagatcatggccaagaaccgtcccagcacgctggtgtggtgcatgggtcagacccagcacaccatcggcaacgcgatcgtgcgggcctcgtgcctcgtgcagctggcgctgggcaatatcggcgtggcgggaggcggcgccaacatcttccgcggccatgacaacgtgcagggcgccacggacgtgggccccaacccggactcgctgccgggctactacggcctggccaccggcgcgtggaagcactacgccgcggtgtggggtgtggactatgaatggatcaagaagcagttcgtctcgcaggcgatgatggagaagtccggcaccacggtgtcgcgctggatcgatatcgtcaccgagaagaacgagctgatcgaccaggacaacaacgtgcgcggcgtgttcttctggggccatgccccgaactcgcagacgcgcggcctggagatgaagaaggcgctggacaagctcgacctgctggtggtggtcgacccctatccgtcggcgaccgcggccatggccaacatgccgccggccgagggcgacaaggtcaacccgaaccgcgcggtctacctgctgccggcatgcacgcagttcgagacctcgggcacgtgcaccgcgtcgaaccgctcgctgcaatggcgcgagaaggtcatcgagccgctgttcgagtcgatgcccgaccatacgctgatgcaggcgtttgccgaccggctcggctttggcaaggagctgtcgaagaacatgaagctgatcgaggtgaagcgcgccggccgcacctggatggagccggagccagaatcgatcctgcgcgagatcaacgccagcaactggaccatcggctacaccggccagtcgccggagcggttgaaggcgcatatgcgcaatatgcagatgttcgacgtcaagacgctgcgctgcaaggcgggcaaggacccggtgaccggctacgacctgagcggcgactacttcgggctgccgtggccgtgctacggcacgccggaactgaagcacccgggctcgcccaacctgtacgacaccagcaagcacgtgatggacggcggcggcaacttccgcgccaatttcggcgtggagcgcgacggcgtcagcctgctggcggaggacggttcgtattcgctgggcgctgagatcaccaccggctatccggagttcgatcatgtgctgctgaagaagctggggtggtgggacgacctgaccgatgccgagaaggccaaggccgaaggcaagaactggaagaccgacctgtcgggcggcatccagcgcgtggtgatgaagaaccatggctgccacccgttcggcaacgccaaggcgcgcgcggtggtatggaacttccccgacgcgatcccgcagcatcgcgagccgctgtactccacgcgcccggacatggtcgccaagtacccgacccacgacgacaagatggcgttctggcggctgccgacgctgtacaagtcggtgcagcagcgcaatatcgagaacaaggtctatgaaaagttcccgatcatcctgacctccgggcggctggtcgagtacgagggcggtggcgaagaaacccgctccaacccgtggctggccgaactgcagcaggagaacttcgtcgagatcaacccgcgcgcggcgtccgaccgcggtatccgcaacggtgacttttgctgggtgaagacgcccaccggggcccgcatcaaggtgcgcgcgctggtgaccgagcgggtggggcccgataccgcgtttatcccgttccatttctcgggctggtggcaaggcaaggacctgaaggactactaccccgcgggcgcgatgccggtggtgcggggcgaggcggtcaacacggccaccacctacggctatgactcggtgacgatgatgcaggaaaccaagaccaccgtttgccagatcgagcggtttgcctaagcgcagagggacaccatggcacgcatgaaatttatctgtgacgccgagcgctgcatcgagtgcaacagctgcgtcactgcctgcaagaacgagcacgaggtgccctggggcgtgaaccggcgccgcgtggtcaccgtcaacgacggcatggtcggcgccgagaaatcgatctcggtggcctgcatgcactgttcggacgcgccctgcatggcggtctgcccggtcgactgcttctaccgcaccgaggacggcgtggtgctgcacgacaaggacgtctgcatcggctgcggctactgctcctacgcctgcccgttcggcgcgccgcagttcccgtcgaccggcaccttcggcgtgcgcggcaagatggacaagtgcaccttctgcgctggcggcccggaaaagaacggctcggaagctgagttcgagaaatacggccgcaaccgcctggccgaaggcaagctgccgctgtgcgccgagatgtgctcgaccaaggcgctgctgggcggcgacggcgatgtgatcgccgacatcctgcgcaaccgcgtgatcaagcgcggcaccggcggcgacgtgttcggctggggcacggcctacggcaccgccaagggcggcgcggcccagccggcccaaccggcacagccggcgcccgctgcaccggccgcacccgcggccccgggagggcaagcgtcatgaaccgcgtccgcgttgttgcattggtgtcgctgtgcggcgtgctgctggcagcttgcggcgagaagccgcagaccatcagcccgtcgcaccgcaagactgacgcccaggcctaccagggcgccccggatgatccgttcgtggccaagggctggaagcagggcgacaagaccagctgggacaaccagattcgccagcgcaaccagttgcagaacgagtacaaccgcacgcaatgaaggcgctgcagctgggccgccccggcagccgggcgctggccctcgacgatccgaaggagtgcacatgacgccgtcgcagaatgcatgccgcgcaggctggcggcgctggctcagcgccggcgcgctggcgctggcggcctttgccggcaccgccgccgcacaggcgccggcctcggcaccgccggcaccggccgccgcgcaggccaatgccgacaccaacaacccggccacgcacccggtccagccgctggccggcatcgcatccgagaatatcttcaacataccgcgccgcgatatcgccgccgaggcccagtcgcagcagcagcgcaccgtcacgcagcccggcaacaatgcgccggtctggcgcgaggtcaattccgaccagcgccactacagcagcctgcccgacaaggaagccggcgtgctgatccagcgcaccgggcagcaatggcgcctgttccgcaacggcgtcatcaccgtctggggcggctggctgctgctggtggtgccgcttgccatcctgggcttcttcctctggcgcggcgccatcccgctgcgcacgccgcgcaccggccgcatgatcgagcgcttcacgccgcttgagcgcattgtccactggaccatggcgatctcgttcgtggtgctggcggtgtcgggcatcgtgctgctgctgggcaagcatttcctgctgccgctgatgggccacatgctgttcggctggctgacctacgtgctgaagaacctgcacaacgtgatcggcccgatcttcacgctgtcggtgatcgtggccttcgtggtgttcgtgcgcgacaacctgcccaaccgcgacgacatgcgctgggtcaccagccttggcggcctggcgtccggcaagcatgtgccgagcgggcgcttcaatgccggcgagaagatgtggttctggatcggcgtgttcgtgttcgggctggtgctgtcggcatcgggctgggtgctggacatgatcgtgccaggcatggactactaccgcgcgaccatgcagatcgccaacgtgatccatgggatctcggccgtgctgatgatcgcgatggcgtgcggccatatctacatgggcacggtcggcatggaaggcgcctaccgcgccatgcgcgacggctgggtggacgaggcctgggccaaggagcaccacgagcactggtacgacgacatcaagtccggcaagatcccggcccagcgttcggccagcccggaagccgccgcggggcgcaacacccggcataccccgggcgaagcctgaggccggctgccaaccagaccatgcggaacccacgatgacgatgacacgcaccctgacgctggttgccctgtgcgcgggcgccacccttgccaccggcgcgctggccaagctgccgccgccgaccgaggcccagcaggccaaggccgctgagaccaaggcgcgcaccgcctgggccgacaaggtcgccgcctaccagttgtgccgcgcgcaggacaagaccgcggcgcgttacttcgccgagcgcaaggcccacggccaggaaacccgcgcgccgtcgcaagccgccgcgtgtgccgatccgggcccgtttgtggcgccgaccgccgctgcgcctgccgccccggcgccagccgtggccagcaccgcggccgacgccaaaccagccgcggccggcgcggtacaatcccctgcaaaggcgccgtaaccacagccccatgcacgccgcgcgcggcgcggggccctcaccagcagtcccgagcccctcgtcatgaccctgcgtcccgagcttacccaggcagccgttcccctgatcgaagaggttgaagtcgtcgacgagcagggccgcgtgcgcgcggcctacctgccgggcgagcgtccgctgacggtctacctcgacaagcgcgagctggtcacgctgatgaccctgggcggcgcgcccgagcacctggtgctcggctacctgcgcaaccagcggctggtggaatcgatcgaagacatcgccgcggtgcaggtcgactgggaaaccgagtccgccgccgtgaccacgcgcaatggcgtggaccgcatcgaggaacgcaccgcgcgccgcgtggtgaccaccggctgcgggcaaggcaccgtgttcggctcgctgctcgatgaggtcgacaacatccgcctgccggttggcgccacgctggaccaggacaccctgtacggcatcatcgacaccatccggctgcagcagtcggtctacaagcaggctggctcggtgcacggctgcgcgctgttccagggcaccgagctgctgatgttcatcgaggacgtgggccgccacaacgccgtggacgccatcgccgggcgcatgtggctggaaggcatgacgggcagcgacaagatcttctacaccaccgggcgcctgacttccgagatggtgatcaagggcgcgcagatgggcatcccgttcctgctgtcgcgctcgggcgtgacgcagatgggctaccagatggcccggcgcgtcaacctgacgctgtttgcgcgctgcaccggcaagcacttcctgctctacaccgggcgcgagcgcttccgccaccggctgcctgaagacgcggtggcgtaagcggcacttggttgcttgcgtttgcataaaggggtgggcgcgattggttgtacaatgcggcgcactccgagccagtgtgtttaccctcccaaccttatgagcatcaaatccgacaagtggatccgccgcatggcggagcagcacggcatgatcgagccgttcgcgccaggccaggtccgggagcaggacgggcgcaagatcgtttcgtacggcacctcgagctacggctacgacatccgctgcgccgacgaattcaagatcttcaccaatatcaacagcaccatcgtcgatccgaagaatttcgacgagaagtcgttcgtggatttcaagggcgatgtctgcatcatcccgcccaattcgttcgcgctggcgcgcacgatggaatacttccggatcccgcgcagcgtgctgaccatctgcctgggcaagagcacctacgcccgctgcggcatcatcgtcaatgtgacgccgttcgagccggagtgggaaggctatgtgacgctggagttctccaacaccacgccgctgcccgccaagatctacgccggcgagggttgcgcccaggtgctgttcttcgagagcgacgaagtctgcgagacctcgtaccgcgaccgcggcggcaagtaccagggccagcacggtgtcacactgccgaagacctgagcgcattacaatgccggcgtttgccggaaggctggccccgagaatggccgccacacctgacgtcagagccacatgtcgccgcagcggggaacctcatgccggccatgtggctcaagtcctttatgtcctgctttccatcaaggatgcccgatgaaattccgtttccccgtcatcatcattgacgaagactttcgctccgagaacatctccggctcgggcatccgcgcgctggccgaggcgatcgagaaagagggcatggaggtcatgggcctgaccagctacggcgacctgacgtcgtttgcgcagcagtccagccgggcatcgacctttattgtctcgatcgacgacgacgagttcacgcgcgacggcgatgaccagctcgaggccgccgccatcgaaaagctgcgcgccttcgtcaccgaagtgcgccgccgcaactcggacctgccgatcttcctgtacggcgagacccgcacctcgcgccacatccccaacgatattctgcgcgagctgcacggcttcatccacatgttcgaggacacgccggaattcgtggcacgccacatcatccgcgaagccaaggtctacctcgacacgctggcgccgccgttcttcaaggcgctgatcgactacgcgcaggacagctcgtactcgtggcactgcccggggcactcgggcggcgtggctttcctgaagagcccggtgggccaggtgttccaccagttcttcggcgagaacatgctgcgcgccgacgtctgcaacgcggtcgatgaactgggccagctgctggaccacaccggcccggtggccgcgtcggagcgcaatgccgcgcgcatcttcaactccgaccacatgtatttcgtcaccaacggcacctccacctcgaacaagatggtgtggcatgccaacgtggcgccgggcgacatcgtggtggtggaccgcaactgccacaagtcgatcctgcatgcgatcatgatgacgggcgcgatcccggtcttcctgatgcccacgcgcaaccactacggcatcatcggcccgatcccgaagagcgagttcgatccggagacgatcaggaagaagatcgccaaccacccgttcgccagcaaggccaagaaccagaagccgcgcatcctgaccatcactcagggtacgtacgacggcgtgctgtacaacgccgagcagatcaaggaaatgctggccgccgagatcgatacgctgcacttcgatgaagcctggctgccgcatgcggccttccacgacttctatcgcaatatgcacgcgatcggcaaggaccgcccgcgcagcaaggacgcgctggtgttcgccacccagtcgacgcacaagctgctggccggcctgtcgcaggcctcgcagatcctggtgcaggattccgagacgcgcaagctggaccgctaccgcttcaacgaggcgtacctgatgcacacctcgaccagcccgcagtactcgatcatcgcctcgtgcgacgtggccgcggcgatgatggaagcgccgggcggcaccgcgctggtggaagaaagcatccaggaggcgatggatttccgccgcgccatgcgcaaggtcgagggcgactacgacgacggcaaaaacggcgactggtggttcaaggtgtggggcccggacgcactgatcgaagacggcatcggcgaccgcgaagagtggatgctcaaggccaatgagcgctggcacggcttcggcgacctcgccgacggcttcaacctgctcgacccgatcaaggccaccatcatcaccccgggcctggacgtggacggcgagttcagcgaacgcggcatcccggcggccatcgtcaccaagtacctggccgagcacggcatcatcatcgagaagaccgggctgtattcgttcttcatcatgttcactatcggcatcaccaagggccgctggaactcgctggtgaccgagttgcagcagttcaaggacgactacgaccagaaccagccgctgtggcgcgtgctgccggaattcgtcgccaagcacccgcaatacgagcgcatgggcctgcgtgacctgtgcgatgcgatccacagcgtgtacaaggccaacgacgtggcccgtgtgacgacggagatgtacctgtcggacatggagccggcgatgaagccgtcggacgcctgggccatgatggcgcaccgcgagatcgagcgcgtgccggtcgacgacctggagggccgcgtcaccgccatcctgctgacgccgtacccgccgggcattccgctgctgattccgggcgagcgcttcaaccgcaccatcgtgcagtacctgaagttcgcgcgcgagttcaacaagctgttccctggcttcgagaccgacatccacggcctggtcgaggacgaggtcgacggcaagacggcgtactttgtcgactgcgtgaagcagggcggctgagcgccagtccgcgttccgctgacgtgagcagggccccgctatgcggggtcctttcttttgaggtggggctaggtgaacggattcagcagcatcgcgcccgtgccgcggaaatcctcaacattgcgcgtgacaatggtcaggtcatggatcagcgcggtggcggcaatgaacttgtccagcgcgtgctcaggccgcggcgcgcgcagctggccccagacctgggcgacgtcggcatcgaccggcaacaccagccggccaaaatcctccagcacggtcgccagccattgctccagcagctcggcctgcgccgtatcgccgcgatggcggatcagcgctacgccacgctggagctcgcccacggtcagcgccgacaggtagagcgcggcaccttcccgcgccgcctgccggaagaacgcgcgcacgccggggttggcgcgctcgcgcttgcgcgtttcgctgatgacgttggtatcaatcaaatacacgcggcgcctcgcctggattctggatccgctcgaagtcggcgtcttgcccgacgtccgggatgctggccagcacctcggccaggctgcgccggcgcgtgccgcccagcgcctgcgccaggatggcgcggtgctcggcctcggcgctgcggccgttggcgacggcccgctcgcgcaggcgctggaccagggattcatcgatgccacgaacgagtagtgttgccatcttgagctcctcaccatcggatggagcaaggatagcattgttatcaatacggcggtcacgtatcgacggcaggctgtgcatcgttgccgtgtccggccggtacaagggtgtggtgggcatggtggctctcctgggggtcagtctgctgaacacaggagccagtctgggccccgccggagcgccggtcgatgagccgattcgcaatcgcgcgccatgccttgcggcgacaccaaagcgccaccgcgccaccaccgccggacggcgccggggtggacccgcgccaatgaaaaagccccgcgttgccgcggggcttgccaggcttgcgcgtccccggggagctggttcagcgcttcttttcgaactcaaactgcggcgcggccgattcgctttccgcgggcggctgtgtcggcagctccagcgatccgccagcggcgggctgcgaccccggtgccggtaccgacaggctcggcgccggcttggggctggtgcctcccaggtcgaggctcaggtcgcgcgtgatgctgcgatcctgtgccttttgcgtgccggtgctgaccaggccggggaagacgatgatcagcgccaccatcaccagctggatgaccacgaacggcaccgagccccagtagatatccgaggtcttcacctcgcgcggcgcgactgagcgcagatagaacagcgagaagccgaacggcgggtgcatgaacgaggtctgcatgttcacggccagcagcacgccgaaccagatcaggtcgatgccgagcttgtccgccaccgggccgaccagcggcaccaggataaaggccagctcgaagaagtccaggaagaacgccagcaggaagaacagcacgttcaccgcgatcaggaagccggcctggccgccgggcagcgcggtcagcaggtgctccacccagatatggccgtccacgccgtagaacgtcagcgagaacacgcgcgcgccgatcaggatgaagatcacgaaggccgacagcttgagcgtcccttccatcgcctgccgggtcagccccaggtcaaggcggcgcttcatcagcgccagcaccagcgcgccgagcgcacccatgccgccgccttcggtcggcgtggccacgccgacgaagatcgtgccgagcaccaggaagatcagcgccagcggcgggatcagcacgaaggtgaccttctcggccatgcgcgacagcaggttcagcttcagcgccttgttgatcaccgccagcacgaaggcgaacaggatggccgcgccgaccgagatcaccagccgctcatccagcggtgcctcgggcttgtacatcttgtccaccgccacgcccaccacgatcgacagcgcggtcagcaccagcaccgaggtggcgccgctcttgccgctgggttcgcggaaggtgcgcgcctcgagcggcagcgccggcgccgcggccggcttgatcagcgtgatcagcagcacgtagcccatgtacaggccggtcagcaccaggcccggcacgaacgcgcccttgtacatgtcgccgaccgagcggccgagctggtcggccagcacgatcagcaccagcgacggcggaatgatctgcgccagcgtgcccgacgcggcgatcacacccgacgccagccgcttgtcgtacttatacttcagcatcagcggcagcgagatcagccccatcgagatcaccgaggccgccaccacgccggtggtcgctgccagcagcgcgccgacgaagatcacggcataggccaggccgccgcggatcgggccgaacagctggccgatggtgtcgagcaggtcctcggccatgcctgagcgttccaggatcaggcccatgaaggtgaagaacgggatcgccagcagcgtgtcgttctcgatgatgccgaacaagcggctgggcagtgcctgcagcagcgcgggctggagcaagcccagctcgatgccgacgaaggcgaacagcagaccgttggcggccagcgcgaaggcgatcggaaaacccgacagcaggaatatgaccagcgtgccgaacatgatcggcgccatgttttggatcaggaattgcgtcatcgtaggcgcctgttattgttttgccgacgggccggggcgattggcgtccgctatcgtcgcggcgatttccgctgcggggtcgatcgaatgcttgcggaatgcggaggccggcagcaggcccttcaggtaggcgaagcgcttgatcagttcggacaggccttgcaggatcagcaggaagaagccagccacgatcaggaacttggccggccagcggatcaggccgccggcattgcccgacatttcatggccgacgtaggacagccagaagtaggggatcgacaaccacagaatgatcagcgtgatcggcatcaggaagaaaatgatgccaaagacgtcgatccacgcctgggcgcgctcggacaggcggccggcaatgacgtcgatgcggacatgctcgtcgcggcgcagcgtgtagggcgcaccgagcaggaacacaccggcgaacatataccactgcagttcgagccaggcattggagctgatgctgaaggtgtagcgaatgatggcgttgcctgcgcagaccagtacggccagcaggatcagccatttcgcccactgcccgatgaaatcagtcacggcgtcgataagccgcgagatcctcataaggaaagacatgtgatcgtcctagggattttggggatacaggggtggcgcgttagtctacggtgtcagccgctccgtatctttagggtgaatccccagtgcatcacatttgcaccgatttccgcaccaattaggtgcggttttcgatgggattcggatatttcaaggccgaatgtttaccggcggagaatgaccgctacttgccataaaccatagctaatacgtgcgtttgcacacagaaaatcagaacgggagcttgttgctcccgttcatggccggcgggttacccctgaagcgggggtcagccgttcagcgtcttgcgtgcctcggcgatggcggcgcgcacctgcgccggcgccgtgccgccgatatggtcgcgcgcggcgaccgagccttccagcgtcagcaccgcgtgcacgtcgtcgccgatcagcgcggccttgtcgcccaggcccgagacttcgcgcagctcggccacgctcaggtcggccaggtcgcactggcggctgtcgcaggcgcgcaccgcgtgggccacggcctcgtgggcgtcgcggaagggcaggcccttcttgaccaggtagtcggccaggtcggtggcggtggcgtagccctgcagcgcggcggcgcgcatcgcttcgggcttgacggtgatgcccggcaccatgtcggcaaagatgcgcagcgtgtccacgacggtatcgaccgtatcgaacagcggctccttgtcttcctggttgtccttgttgtacgccagcggctggcccttcatcagcgtcagcaggccgatcaggtggccgttgacgcggccggtcttgccgcgcgccagttcgggcacgtcggggttcttcttctgcggcatgatcgagctgccggtgcagaaacggtcggcgatgtcgataaagcccacgcgcgggctcatccacagcaccagctcttccgagaagcgcgacacgtgggtcatcaccagcgcggcggcggcgcagaattcaatggcgaagtcgcggtccgacacggcatctagcgagttgcggcacacgccgtcgaagcccagctgctgcgccacgaactcgcggtcgatcgggtagctggtgccggccagcgcggccgcgcccagcggcaggcggttgacgcgcttgcggcagtcggccatgcgctcggcatcgcgcgtgaacatctcgttgtaggccagcaggtggtggccgaaggtcaccggctgcgccacctgcaggtgggtgaagccgggcaggatggtgtcggcgttctgttcggccaggtccagcagcgcggcgcgcagcgcgcccagcagcaccatgatgttgtcgatctcgctgcgcagccacaggcggatgtcggtggcgacctggtcattgcgcgagcggccggtatgcaggcgcttgccggcatcgcccaccagcgcggtcaggcgcgcctcgatgttcaggtggacgtcttccaggtccagcttccactcgaagccgccggcctcgatctcggccttgatctgcgccatgccgcgctcgatctcggcgcggtcggcctcggcgatgatgccctgctttgccagcatggccgcgtgggccagcgagccctggatgtcgaacagggccaggcgcttgtcgaagaacaccgaggcggtgtagcgcttcaccaggtcggacatcggttcggagaagcgggcggaccaggcttcgcctttcttggcaagttgggaggtggacatggacgtcggctgcagtggctcgcgcgggcaggcgccggcgtgcggacggcggcgggcgcgagaaattgggaaacggcgattatatcgcccgccggcccgctggcggcactgggtggcgctggccggcccggcagcgccgatcatcagagccggctgtggatcacaggccccttgaacaccaccgggccgcttggcccgtcggcattgggcgagccgcccggcggctcgatgctgaccgccagcgcgggcaccgccgcgggcagttgcgccagcgccagccgggcttcgggtgcccgcccgatcacgccgagcaactgcggcttgccgcccgcaggcagtgcccacaactgcagtacctgctggtcgctcagcgccaggtgatccaggcggcgcacgatcaggctgcgtgcgccggcgtcccacgacaccagcatcgcaggctgggcacggtcgtcgttcagcacggcgaggacctcggccggcgccgcctgatcctgccgggccagctggatgccgatgccgacggccagcaccgccaccatggccattgccgccgcggcgccgcgccagaacaccggggccgaccacaggcgctgccaccagccgtccgcggggcgggtgtcaggcgccgggcggtccggctgactggccggatctgccattttccagccgaggcgatcctcgatcccgcaccagaccttgtcgaccggctcggcggccgcctgcaactcggccacgcccgccagccgcgcctgccagcggtggatcgcggcgcgcaccgcgggctcttcgcgcgcgagttgttccaggcgtcggcgtgcgccgccgcgcagcacccccagcgcgtactgcgcggcgatgcggtcgagcaggtcgggatggctggccagcttcatgccgcgccctccatgcagctgcgcagccgctccaggccgcgccggatccaggacttgaccgtccccagcggcgcgcgcaggcgggcggccagctcggcgtggctcaggtcctgcaggtaggccagcatgatggcctggcgctgcggctgctccaggcgctgcaggcagcggttgagcgcgcgtgcctgctggctggcatcggccagttccgcgggcccggcggtgtcgtcggccagccactcgcccaggtcttcgtcaagctcgaccgtctgcccgacgcgtgccgcgcttgcccggcgcaggcagtccagcgcgcggttgcgcacgatcgcggtcatccaggtcatcggcgcggccaggtgcggccggtagtcgccggcgtggtgccagatgctgacaaagctttcctgcacgacatcctccgcccaatcgcgcctgccagtgatacgcagcgcaaggccaaacagtttcgtcgcggtgaggtcatagaggccgcgcagcgcctgccgctcgccgatggccacggcctggagcagggccgcaagccgctcggcgccgggcggcgcggcgtaggtttcggcggaaggggacaccggagaggggggcaccggggcgtctcgcgaaagggtgttgccggattataggcacgaccttgcatccgattggccccggcgtgcgtatcaggtggcaggcgcacgatggcggccccgggctgcgggccgcggcgccgttgatcccacacaggagaacatcatggaacgcatgcgcaccactgcggtcacgacagatccgaccgattcccttgaccgcattgtgaccgcgcccgatgcgcgccgccgcgggctgctcaaggcgccggggctgttcgcgctgggctcgctcgccgtcatcagccttggcgagtccatgccggcctgggcgcagacccagtcgggcagcaccagggacgacatcaatatcctgaacaccgcgctgggactggaataccaggcgatcgcggcctaccaggtgggcgcggaaagcggcctgctgcaaaagccggtgcttgccaccgcggtcaagttccaggaccaccacaaggcgcacgcgcaggtgctggccgggacggtgtcaaagctgggcggcaccccggtggtggcgaagaaggcgtcggaatacaccttcccgactgacaagctgaagacccaggccgatgtgctgcgctttgccgcggggctggagaagggcgccaccgccgcctacctgggcgtgctgccgaacttccacaaccgcgaactgacccgcgccgccggcagcatcctcggggacgaggcgatgcactgggcggtgctgctgcacgcgctgggtgaggatccggtgccgggggcgtttgtggggtgaggggtcagactggcgccatttgaaagagctgccgcccgatgtggacgcgcccctctcccgcacgcgggagaggggcgcaaaccggcagcactctgacgccaatcagcccgtattgcgcaggcccgccgcgaccccgttgatggtcaggtggatgccgcgccgcacccggatgtcgtcgccatccttgcccgagcggtagcgtttcagcaactcaacctgcaagtggttgagcgggtcgaggtaggcaaagcggttcttgatcgagcgcgccagcagcgggttgtccgccagccgttcctggtggccggtgaccagtgtcagcatctcgcaggtcaggtgccattccttgctgatgcggttgaacacggtgcggcgcagggccgcgtcatcgcacagctgggcatagcgcgaggccacggccaggtcggtcttggccagcaccatgtccatgttggacagcagcgtcgagaagaacggccaggtcttgaccatgcggcgcagcgtggtcacggccagcttgcgcgccttgtcgtccggcgcggtgtccagcagcgacttgaccgcgctgccgaagccgtaccagcccggcagcagcagccggcactggccccacgagaagccccacgggattgcgcgcaggtcttcgatgcggcggttcttcttgtccatcagcttgcgcgaggccgggcgcgaacccaggttcaggtcggcgatctcggtgatcggcgtggtggcgaagaagtagtccttgaagcccggggtctcgtagaccaggtcgcggtaggcggtgaaggctcggtccgacagctgctgcatcacggcctcgaacatgtcgaggtccttgggtgcgttctgctgcggcaacagcgaggcttccagcgtggcggcgaccaccgtttccaggttgcgccggccgatctcggcgttggcgaacttgctgttgatgatctcgccctgctcggtcagacggatctggccgttcaccgtgcccggcggctgcgacaggatggcctggtaggtcgggccgccgccgcggccgacggtgccgccgcggccgtggaacaggcgcagcttgacctggcgctgctcgaacagctgcaccagctccagctcggccttgtacagctcccaggtggaagtcaggaagccgccgtccttgttcgagtccgagtagccaagcatcacttcctgctcgacgccatggtgcgcgatcaccgagtcgaagcccggcaggtccagcagcgactgcatgatgccggcggcgttgcgcaagtcctcgatggtctcgaacagcgggatcaccatcagctccatgcgcgccgggtcggtcttgctgcccagcgtgccctgcagcatgccggattccttctgcagcagcatcacttcgaccaggtccgacagcgtctcggtgtgcgagatgatgtagttgcgcgcaatgcgcttgccatagcgcgcgcgcagctcgcgcgcggcggcgaagatcgccagttccttgcgggtctgctcggaatactcgtgccacggcagcgtcagcaggcgcggctggcgcagttcggccagcagcagttccagcttgcgcgcctcgggcagggcggcgtagtcgggggcgatgccggcggcggcgaacagctcggcgatgaccgcctcgtgcacgtccgagacctggcgcatgtcgaccgatgccaggtggaaaccgaacacgccgatggcgcgcgccagcgcttcgatacggccattggccagcgcctggccatggttggcgcgcagcgagtcgaccaccacctgcacgtcggcggcaaaggcctcggcgctgtcatagggctcggccggcgccaccgggcggcgcggcacggcgtggccggtcagcgccttgctggttgcggccaggcgcgcgtagatgccgatcagcgcgcggcggtagggttcgtcggcgcgatgctcggagtggtcgggcgagcgctcggccagcgccagcagttccgggctggcgtcgaccatcagcgtcgacatcgacagctccgcgcccagcgcatggacttcatccaggtaccagtcgatgatcatctgcccctgctggctggcggcatgctccagcgtctcggcggtgacgttggggttgccgtcgcggtcgccgccgatccaggaacccatctgcaggaacggcgccagcggcgccggctgcgcgcccggagtgcccttgcgcttgcgcgtggtcgggaacaccgcggcgatgtcttcttccagctcgctcatcaactgcgggatgccgcgcaggaaacaggtgcggtagtaggacagggcgttttcgatctcgtcggccaccgtcaggcgcgaatcgcgcagcatgcgggtctgccacagcgtggtgaccttggcgcgcagctgcgcggtgttgtggtcgcgctcgcgcgcggtcatcggcaggtcgcgctcggccagcaggcgggcgatctcgcgctcggcgtcgagaatactcttgcgctggacttcggtcgggtgcgcggtcagcaccggcacgatcagggcctcgtccaggaacttgcgcagctgcttgccggtcacgccggcggcgtcgatcgcctccagcgcgtgggccaggctgcccgcctgcggcggcgagccggccagcgcgtgcacgcggcggcggcggttgtggtgctggtcctcggcgatattggccaggtgcgagaaatagctgaacgcgcgcacgacctggttggtctggtcgcgcgacaggcgcttgagcaggcggtccagctcggcgccggcggcgcggtcgttctcgcggcggaagcgcaccgcggtctggcggatggtctcgaccacctcgaaggcggcgtcgccttcctgttcacgcaggcattcgcccagcaggcggcccaggaagcggatgtcctcgcgcagcggcacgtccttgtcggcggtgcggcgggcggtgggggcgatggtggttccgttgctcgacacgatggaaagcttgggcttgggggaacgtttggtcccgctgcggctggcggggcgtttcggttcggcggcggatgcgccgtttgcgtcaccctgggcggcgccgagggcagggctttggtctttcgcagccggggcggtccgccggccgttggggcgcgcagcatgctgcgtcatgcaatctcctcgttctgcttctagcttatctattggtgcggagggactattgggtcgcgtgctaccattgacgcatgtcgtctgccaccctgtcttcctctaccgctgtcgtgtctcgcaatcttccgcaaaagctcgtcattgcctcccgagagagccgtctggccctgtggcaggcagaacatgtgcgtgctgcattgcaacaatactatcccgcgtgcgacgtgtccattcttggcatgaccacgcgcggagaccagattctagaccgtacgctgtccaaagtcggcggcaagggtttgtttgtcaaagaactggagttcgcgatggacgaaggccgggcggacctggcggtgcattcgctcaaggatgtgccgatggagttgcccgaaggcttcgccctgaccgcggtgatggaacgcgaggatccgcgcgacgcgctggtgtcttccgcctacgcctcgctggacgagatgccggccggcaccgtggtcggcacctccagcctgcgccgtgaggccgcgctgcgcagccgctacccgcagctggtgatcaagccgctgcgcggcaatctggacacgcggctgggcaagctggatcgcggcgaatacggcgccatcatcctggccgccgccggcctcaagcgcctgggcctgggcgagcgcatccgcgcgctgattcccatcgacgtgtcgctgccggccgcaggccagggcgccctcggcatcgagatcctggccaaccggcctgaacttgcgcaatggctggcgcccctgaaccaccagccgacggcgctggccgtgagcgccgagcgcgccgtgtcgcgcatgctgggcggctcgtgtcaggtgccgctggccgcccatgcgcgctgggaaggcgatcagctgaagctggacgcctttgtcgccttgcccgatggcacgcgcgccatccgcgctgccgcgtccgggccggcagttgacctggctgctgccgaagcgcttggccaggcctgcgcgcgcgacctgctggcgcagggtgccgaagccatcctcgcggcactggccgattctggcgatcccgccggctcccaagctcctgcctgaggctgccccatgcccagcccgaccgtcgttgtcacacgacccgccgggcagtcccggcaactgaccgaggcgctgcaggccgcgggcctggacgtactcagctttcccttgctgggcatcggcccggccgttgacgacgcgccgctgcgcgcggcgctggcgcggctgaacacctttgcgctggtggtctttgtcagtcccaatgccattgcctacgcgctcgacgcactggccggcgtgcagggcgtggccgtggcccaatggccggcgcaggtgccggtggcggtggtcgggccggccagcgtcgcggccctggccgagcgcggcatcgcgccgcccgcgtgccgggtgatcgcgcccgcgggcgctgccgcaaacgggcagggccccgatgacgccgcaccggaggccgaagcgctgcgcttcgactccgaggccctgtgggcccagctcgatcccgccgcgctggcgggcaagccggtcctgatcatccgcggcaacggcgggcgcgactggctgggcgaccgcctgcgcgaggccggcgcccaggtcgaggccgtcgaggcctaccagcgcacgctgcccgaacccagcgccatgcagtggcaggccgtgcgcgacaacctgcgtcccggcgcggcgccgcatgcgtggctcctaaccagttctgaagcggtgcgcaaccttgacgcgctggcacgccagcatctgtcgcctgaggaagacgctgccctgcggcaggtgcagtgcatcgcgccgcatgcgagaatcgccgaacaggcgctggcgctgggcttcccccatatcctgcgcgccgccccgggcgatgccggcctgctggcggcgtgcctgcagtgggccgatgcccatgccggtcccgcgccggcaagcatggccagcgcgtcaatcgaagccggcccgcccagcgccacagccgaagcgccgccggcccccgtgccggacgcagcagttcccgcaacgtcaacgaaggtcgaacgcgtgacgcaagaaaccacgtcctcctccgctacgccgccgcccacggcggcctccgcagcatcggcgcaagcagcgtccgcgccgggcccggctacccccgctgctcccagtgcagcctcacggcggtccgctgcgttgtgggcgctcgtcgtcgtgctggtggtggcgacggctggcggcttctggtggctgcagcagcgcgttgaccacctgaccggcgagctggcgcgccgccagcaaagcaacgatgcgctggtgcaggagtcgcgcgtgctgacccgcaacgcgcaggacacggtcaaggaactgcaggccaaggtcggcgcactggagaaccaggtcggagagacccgcgacaagcaggtggcgctggaacaggtctaccaggacctgatgcgcaaccgcgacgactgggaaatcgccgagatccagcagttgctgaccagtgccggccagcaactgcagctgaccggcaacgtgcaggtggcgctggccgcgctgcaaagcgccgacgcgcgcctggcgcgcgccgacaagccgcaatacaacctgctgcgccgcgcgatcgcgcgcgacgtcgcgcgcatgaaggcggtgcccgacaccgacctgaccggtgctgcaattaaactggacgaggccatcaaccaggtcgactcactgccgctgctgtccagcgaacgcatgctggagcgcagcgaggccgacgcccgcaagggtgccgcggccaacggtgccagcgcgccggccgccgccgccaacggcgcgggcccgggctggttcacgcgcctgtgggattacctgcgcgaagaactggcgcaggtggtccgcatccgcaaggtcgacgacgccgaggcgctgctgctgtctggcgaccagggctggttcctgcgcgagaacgtcaagctgcgcctgctcaacgcgcgcctggcattgctgtcgcgcaacgaacccgtgttccgcaacgacctggccgccgcgcaagcgatgatcagccgctatttcgataccaagtcgcgccgggtgcagggggtgctgacgctgctgcggcaggcgcaggccggcgcggtcacggtgcagctgcccaccatgtccgaaagcctgggcgcgctgcatgccctgaagaaggagtaagcccatgcgccttctgttctgggttgcggtcctgtttggcggcgccgtcgggctggccctgttcacgcagttcaaccacagcaatgtggtgctgttctatccgccgtatcgcgtcgagctgtcgctgaacctggcgctggccttgctgctgttgctgttcttcgtggtgtggacggtgatgtccaccgtccgccatctggccgacatgccgcgccgcgccgccgcctaccgcgagcgcagccgcatgagcaaggcacaggcggcgctgcgcgagtcgatcgaaaacctgtttgccggccgcttcgcccgcgccgagcgcgccgcgcgcgaggcgcagtcctgggatgaccaggcccagaccgccgcgctgatcggcgcccgcgccgcgcaccggatgcaggaaaccgagcggcgcgacgcctggatggcgcaggtcaccgaccccgagcgcgagcaggcgcggctggtgtcgatggccgagttgctggtcgatgcccgcgatgccgacggcgcgctggagaccatcgcccagctgcagtcgcagggcgcgcgccagatccacgtgcagcgcatcgcgttgcgcgcgcaccagcacctgaagaactggaccgaggtgctgcgtctggcgcgctcgctggaaaagcgcaacgcgctgcatccggtgctggcgctgcggctcaagcagatggccgtcgaagccatgctggaggaacgccgccacgacgccgacgcgctgaccgagttctggcgctcattgtccgccgacgagcgccgcgccacccgcatcgccgaacccgcggcgcgttacttcgcggcgctgggccggcagaacgaagcccgccgcatcatcgaagacgcgctcaaggtcaactgggacagccgcctggtgctgcgctatgccgattgcgccgtgccaggccacgcgctgccgcagatccagcaggccgagaaatggctggccgcgcatcccgcggatgccgacctctattacacgctgggcgtgctatgcctgggcgagaagctatggggcaaggcccagtccagcttcgagcgcgcgctgaaatatgcagagcccgaccagcagcgccgcctgcgcgtgcgcacgcacctggcgctggcgcggctttttgaggaaaccgagcgcttcgacgacgcgcagcggcactatcgcgagagcgcgatgctggcggcctgaggatttcaggctgcgcgtaaactaaccgattgtgtgctccctctctcccgcaagcgggagtggggcgcaccgaccgcaggcaaactgcggcagcaatccggcctgccacccagcagccgcgtcaccatccatccctaccaccatccattccatgactctcgaccgcatcctccaatcccagggctttggcacgcgccggtactgcggcgacctgatcgccgccgggctggtcgaggtcaacggcgaactgtgcgaagacccgcgcgcgcagtttgaagtcgacggcctgcggctcaccgtcgacggcgaggaatggctggcctgcaccaaggcctacctgatgctgaacaagcccaccggctacgaatgctcgcagcgcccgcgccatcatcccagcgtctacaacctgctgccggtgccgctgcgccagcgcgaggtgcaggccgtggggcggctggaccacgacaccaccgggctgctgctgctgaccgatgatggccagttcatccacgcccagacctcgcccaagcgcaaggtgcccaagatctatgaagtgacgactgccgagccggtcacgccggagcaggccgaagcgctgtgcagtggcgtgcaactgctcgacgaaccggcgccgatcgctgcggaagcgtgcgagatcaccggcgaacgcagcctgcggctgaccctggtgcaaggcaagtaccatcaggtcaagcgcatggtggcggcggccggcaaccatgtcagcgcgctgcatcgcagcgccattggcggcctgcggctcgatccggccctggccgaaggcgagtggcgctggctgacggcgcaggagctggccgcactgacccgcaaggattgagccaaactgcaaccccagaccgtggccgggcgctcattgctgcactgcagcgtccgccaatcttttccggaagacccccggcgatttgataaaatgcaaggcatggcgaagcccgaagcacctatcaatctgaccaatcagttcctgattgccatgcctggcatggctgatccgaccttttcgggttccgtcgtctatatctgcgaacacaatgagcgtggcgcgctcgggctggtgatcaaccggcccatcgacatcgacatggccacgctgttcgacaagatcgacctcaagcttgaaatccagccagtcgcgcaccagccggtctacttcggcggccccgtgcagaccgagcgcggctttgtgctgcatgacccggtgggcgtctatgtgtcgtcgctggccgtgcccggcgggctggagatgaccacctccaaggacgtgctcgaggccgtggccaacggcagcggcccgcaccgcttcctgctgacgctgggttactccggctggggcgccggccagctggaggaagagctcagccgcaacggctggctgacggtccaggccgaccccgagatcatcttcagcgtgccgcccgacgatcgcttcgccgccgccatccggctgctgggcatcgacttcaccatgctgtccggcgaggccgggcatgcctgatgccgtggggcgtgaactgccccgcgacggcacggtcctggcattcgactacggcgaaaaaaagatcggtgtcgcgctgggcaacttcatcacgcgcgaggcgcgtgcgctgaccatcctccccaatatcaccgtggaaggccgcttcgaggccgtggcggcgctcatccaggagtggaacccggtgcagctgatcgtcggcatgccggtcaaccccgaaggcggcgagcagccctcgatgaagctggcgcggcgtttcggcaaccagctcaatggccgcttcggcctgccggtggagtgggtggacgagcgctatacctcgcgcgccgcgtcgatggccggcgcccgccgcggcgagctcgatgccgaggccgcccgtatcatcctgcaacagtatttcgaccaattcccgctatgacgcagatttccgttcccgacgccgagtcgctgtaccgcaagctgctggaccaggcccaggcgttgatccccgaggccgagcgcgcgcgctggtcggtggccggcatctactcaggcggcgcatggatcgccgcgcggctggccgctgacctgaagctgcccgagcatggcgtgatcaacgttgccttccatcgcgacgactatgccaagaagggcctgcacagccaggcccagccgaccacgctgccgttttcggtggatgaccgcaacatcctgctgatcgatgatgtgctggccaccggccgcaccatccgtgccgccgtcaacgagctgttcgactacggccgccccgcgcgcgtggcgctgggcgtgctggtcgaccgcggcgggcgccagctgccgattgccgccgacctgactgccgccgagatggcgctgccgcccggcaccacgctggtgctgtcgcgccagggcgagggcgccggcgcacaattcgcctttgcgaccgaacctaccgattccgccaccggctgaaccggcccgcatgccccaggcgcgcccgtgcgcgcctgacccccagctccgagaccagaccacctccgttttttgcccgcgcccgaccagccatgaccaagacgttccgcaacccgcagctcaccaagaacggcgaactgaagcacctgttgtcgatcgaggggttgtcgcgtgacatgatcacgcacatcctcgacaccgccagccagttcgtatcgctgtccgactcagaccgcgatgtcaagaaggtgccgctgctgcgcggcaagagcgtgttcaacctgttcttcgagaactccacccgcacccgcaccaccttcgagattgccgccaagcggctgtcggcggacgtgctgaacctgaacatcaatgcctcgtcgaccagcaagggcgagtcgctgctggacaccatcaacaacctgtcggcgatgtcagccgacatgttcgtggtgcgacatgccagctcgggcgcaccttacctgatcgccgagcacgtcgcgccgcacgtgcacgtgatcaatgccggcgatggccgccacgcgcacccgacgcaaggcctgctggatatgtatacgattcggcatttcaagaaggacttcaccaacctgacggtggctatcgtcggcgacatcctgcactcgcgcgtggcacgctccgacatccacgcgctgaccacgctgggcgtgcccgaagtgcgcgccatcggcccgcgcacgctgctgccgtcggggctggagcagatgggcgtgcgcgtcttccacgacatggaagagggcctgaagggcgtggacgtggtcatcatgctgcggctgcagaacgagcgcatgagcggcgcgctgctgccgtcggcgcaggaatacttcaaggcctacggcctcacgccggagcgcctggcactggccaatcgcgacgccattgtgatgcacccgggccccatgaaccgcggcgtcgagatcgactccgccgtggccgacgggccgcagtccgtgatcctgaaccaggtgaccttcggcatcgccgtgcgcatggcggtgatgggcatcgtggcgggaaatagcgacgaatgatgcagtcgagcgacacgagccagaacacactgaaccagccaagcgacacgacaagccaagctatgaagattcacatcaagggcggccgcctgatcgatccggccagcaacaccgacgccgcgcaggacctctacatcgccgccggcaagatcgtcggcgtgggcagcgccccggcggacttcaccgccaacaagaccatcgatgccagcggcctgatcgtgtgccccggcctggtcgacctctccgcgcgcctgcgtgagcccggctacgaatacaaggccacgctcgaatccgaagtggccgccgccaccgccggcggcgtgaccagcctggtctgcccgcccgataccgatccggtgctcgacgaaccgggcctggtcgaaatgctgaaattccgcgcccgcaccctgaaccagacccacgtgtacccgctgggcgcgctgacgctgggcctgaaaggcgagaccctgaccgagatgagccagctgacagaggccggctgcgtcggcttcagccaggccgaggccccggtgcacaacacccaggtgctgctgcgcgcgctgcaatacgccaagaccttcggcttcaccgtctggctgcgcccggaagacccgttcctgggcggcggcgtcgccgccagcggcgcggtggcgtcgcgcctgggcctgtccggcgtgtcagtgatcgccgaaaccgtgcgcctgcacaccatcttcgaactgatgcgcagcaccggcgcgcgcgtgcacctgtgccggctgtcgtcagccgccgggctggaactggtgcgccaggccaagcgcgaaggcctggccgtgacctgcgacgtcaacatccaccatgtctcgctgaccgacatggatatcggctacttcaactcgcagatgcgcttctcgccgccgctgcgcagcccgcgcgaccgcgacgccatcgtcgccgcgctggccgacggcaccatcgacgccctgtgctccgatcacaccccggtcgacgacgacgagaagctgctgccgttcgccgaggcatcgccgggcgcaaccggcctggaactgctgctgccgctgaccctgcgctgggccgccgagcacaaggttccgctggccctggcactgggccgcatcaccgccgagcccgcccgcgtgatcggcctgaaggccggcaccctggccgtcggcagcgccgcagacgtatgcgtgttcgaccccaggcaggtctggaaggtcgaccgccgctccatcaagagccagggcaagaactcgccgtggctcggctacgagatggaaggcaaggtccgcatgactctggtcggcgggcaagtcgtctacggaaaccacgcccacgcatgatctggctgcgcaagaccgcgctggtgctgcacctgctgcgcgggctggtgacctgcgccttgctgttcccgtggctgggcgtgcgcacgcgcgagtggcatatccgccgctggtcgcggcggttgctgcggatttgcggggtggaggtcgaggtggtggacgccaccggcgcagcgccgcacggcgccggccgccagggtgcgatggtggtttccaaccacatttcgtggctggacatctacgtcatccacagctggcagccggtgcgcttcgtcgccaagtcggagatccgcagctggccgctgatcggctggctgtgcgggaagacgggaacgatcttcatcgaacgggcgcgcaagcgtgacgcccaccgcgtgctgcatgacatcaccgacgtgatgctgcagggcgacctcgtcggcgtgttcccggaaggcacgacgactgacggcaccgaggtgctgccattccacgccaacctgatgcaggcaccgatttctggtggattgcccgtgcagcccctcggactgaactacctcgatgccactacgggtcaaccaacgcttgccgccgcctacatcggcgagaccacactgctgcagtcactggaagcggtcttgcgcgcacccaggatcaaggccaggctggtaatcgggcctgcgctggtgccggcctcgggcgaccgccgcgagcttgcgaactccgccagggaggtggtcgcccacctcagccagggcgcgccggaacacgctgccgccgcggcccggcggctgaaccaccccgttgagcccggcggcgtgccccagccgagctccgctgccatcagctagccgtcctgtcgtccccgccaacgcgggattgccagtcaggccagcgggtcacaatattgcgggcaatcaacctgaacgacggtccgttcggcaggatcctgtgccaaccgggccgccgtcagcttgccaccccagacgcagccagtatccagcgccatcagattcggccgcatgaccaggcccagcgtcgaccaatggccgcataccaccgtcacatccccggtacgccgccctggcacgtcgaaccacggcatgaacccgtccggcgccttgcccaggccttccttggtcttgaagtccatcacgccatcgacagtgcagtagcgcagccgggtgagggcattgaccaccacgcggtggcgatcaatgccgcgcaggccgtcgtgccagcggtcggcggcgttgccgaagatgtcggcgaggaagccttgccagttggggccttggagttggtcttcgacttcgcgggcgaggtcgatgacttgggcagcggtccattgggggaggacgccggcgtggattaggaggaagttgttttctagcagggcgagggggcggtggcggagccaagtgagtagatcctcacaatcgggggcggtgaggatgtcgtcgagggtgtcggacttgcctttcttacggacgccggcggcgactgcgaggaggtggatgtcgtggtttcccaggacggtttcggcgcgtggacccatggcatggacggtgcgaagggtctgcaaggaggaggggccccggttgatcaggtcgccgacaaaacggagagggagtccggagggcagtttggccagcagcgcttccagggaaggggcgcagccttggagatcgcccacggcatatggtgatggatgggatggtcttggtgttgtcatctgggtgaaccatatccgcatccgagccggtgcctgtgatctgaggctaccaaacgggcggcagtgaacgtaggatgggtcatgtcagcagatagaataccgtcactttcgggcaacgaacgactaacggtccgcctcggatggcgagagccggcgtgagtttgacgtcgaagcatattgattgtcgggagcaaactttgtcgcacattttggtcaccggcggcgcggggttcattggcgcaaactttgttatcgactggctgcgccaggaaggcgccgccgggatcgtcaatgtcgacaagctgacctatgccggtaaccgaaagagccttgccgcgctcgagggcgatgtccgccatgtctttttgcaggccgatatctgcgacaccgcggctgtaaccgccttgctcgaagcgtatcggccacgcgccgtcttgcattttgctgcggaaagccacgtcgaccggtccatagtctctccgggcgactttgtgcagaccaatgttgtcggcacgtttcggctgcttgaaactgttctggaatactggcaggcactggatgcgcccgcgcgcgccgcgttccgttttctccatgtctcgaccgacgaggtattcggttcgctcgcacctgccgatcccccgtttacagaagtctcgcgctatctgcccaacagcccatattctgcctcgaaggcagcgtcggaccacatggtacgtgcttaccatcacacctacggcctgccagtattgaccacgaactgctccaacaattacgggcctttgcagtttcccgagaagctgatacccctcatgattaccaacgcgatggttggcaagccgctgcccgtgtatggcgatgggctccacgtccgggactggctatatgtaggcgatcattgcgcagcccttcgcgaggtgttggcaagcggtcagcccggtgcaacctataacatcggcggcttgaatgagaagaccaatctggaagtcgtgcaggcgctgtgcgatctgctggacgaggtgagtccgaagactgccggttcgtatcgcaaccagatcacgttcgtcaaggatcgtcccggccacgaccgacgctacgcggtcgacgcgggcaagcttgcccgagaactggggtggaagccgtcggaaacctttgagtcagggttgcgcaagaccgtgcagtggtacatgcaaaacgcggaatgggtccaggacgtgctgtcgggcaattaccgcaactgggtaggcaagcaatatgtcgcgtagccaggaatttcccacgatcctcttgaccggcagcaacgggcaggtcgggtttgagctgcgccgcagcctggcgccgctggggcgcatcgtggcgcttgaccggtcagcctgcgaccttgcggatccggcccagattcgtcgtgccatacgccagtcccggcccgacgcgatcgtcaatgcggcggcatatacggccgtggacaaggcggaaaccgaagccgatcttgcctttgcgatcaatgctacggctgtagcagtgatggccgaagaggcgcgccgcctggggacattgctcgtccactattccaccgactatgtgtttgacggccgcaaggatggcctctatttggagaccgaccccgtcaatcctctgtccgagtatggaaagagcaaggtggctggcgaagaatccatccttgctgcaggtgtcgcttcgctgatcctgcggacgtcgtgggtggctggcgcgcacggtaaaaattttgccacgacgatactcggcctagcccgcgagcgacgcgaactgcgtgtggctgcagatcagcatggtgcaccgacctccgcttccctaatcgccgacgtgaccgcgcagatccttgcgcgccactggcttttcagcaaccgcgatacattccccgcgggtatctatcatcttgccgcctcgggtgagaccacctggcatgcctatgccacggaagtcttgcgccatgccgcttcccatggcgtcgtgctgaaaatcaggccggaggatatccagggcattccagcggccgagtattattccgcggcagcaccccggccggcaaactctcgcctggacaccaccaagttgcgcaagaccttcggcatccatcttccgtcgtgggaagagggggtgcgccacctgctggaccagatcctgaccaagcgagctctccatgcgtaaagggattattttggccggcgggtccggcacgcgcctctacccgattacgcggtcggtatcgaagcagttgctgccggtctatgacaaaccgatggtctactacccgctgtcgaccttaatgctcgctggcatccgtgacatcctggtcatttccacgcccgaggacacgccgcgctttgccgggatgctgggcgacggtagcgcctggggtatcaacttgcagtatgcagtccaacctacgcccgatggtctggcgcaggcctttgtcatcggtaaggacttcatcggcaaccaaccttcgacgctgattctcggggacaacatcttttacggccacgacctcgtcgcgcggctcaagggcgccgccgggcagaaagacggcgctacgatattcgcataccacgtccaggatcccgagcgttatggggtcgttgaattcgacggcgactttcgcgccaggtcgctcgaagaaaagccgctcaggccccgttccaactatgcggtgaccgggctctatttctacgacaatcaagtgtgcggcattgccgctgccctgcgtccctcggcccggggcgaactggaaatcaccgatgtcaacaaccattacttgcaggccggccaactgaatgtcgagatcatgggccgcggctatgcctggctcgacaccggcacgcatgagtcgctgctcgaagcggcaagctttatcgccacgctgcagaaccggcaagggctgatggtggcctgcccggaagaaatcgcttaccgaagcgggtggatcaccgcggagaaggttgtagagcttgccgggacactgggcaacaatgggtatggcaactacctgcggcaaatcatcatggatccggtcaaatgaagatcacaatcacgcccacggcactgccagaggtgcttgtcatcgagccacaggtgttcagcgaccagcgcggctttttcatggaaaccttcaatgcccaggccttcgagcaggctactggcatccgtcgcacttttgtccaggacaaccattccggctcggtgcgcaatgtgctgagggggctccactatcagatacagcatccacagggcaagctgattcgcgtgattgctggcgaggtattcgacgtcgcagtcgatgtccggctgggctcacccacatacggcaagtgggtaggcgtaacggtttcggcagcagacaagaagcaactttggatacccgagggctttgcgcacgggttcctggtcttgtcggaacatgccgaagtcctctataagacgactgactactggtaccctgagcacgagcggacgctgttgtggaacgatcccgcggtcggtgtgcgttggccgctcaacggggcgccgctccttaccgccaaggatgcggcggggaagcttctgaccgaggctgacgtctcttgctgagctgtcggcgactgagcggattcatcacctgcaatgcgtgcgtgcatcaggaccgatcaccggaacctgggaacgctccttgctccgaccatccgtatcgatggcgattctgtaagtgggtgtatcgttaaatgcggaccgtgtgtgctttaataggcactcatcggtcgcattttgcgaattttggcgctccgttctgccgcagcacggcccccaagccatacaatgcgctcccattgagcgcgctagcaacatagtgcgatcttggcaagaggcattggcctatttgccttcaacgttacagatggcaagacaaaattacatgggtcttacagggctgcgagagcgctccgttacaattcgcccctgagactaaaaagtggtcaatcatgcaaatcattccagtcattatctccggtggtgcaggcacccggctctggccggtttcccgtgaggcattccccaagccgctgcttaagcttgcagatggtgaaagtctgctgcagaagacttttaagcgggcaactctgtttgaggatgtgccggaggtggtggtggtcactaaccgggagaccttcttcctgacgcgggatgagtgccaggaggtgaatgaggaccatattccactgggattcgtgctggagccgtttggccggaatacggcgggggcagtggcttccgcggcttgctgggtcaagaaacatcacggcgaggacgccgtgatgctggttttgccggcggatcatttgattgaggatccggagcagttccaggccgcagtgaatgctgctgcggccgccgctgcggaaggacgtatcgtcacattcggcatccgtccgaccgcgccggagaccggctatggctatatcgaattcgacaacgagaaggggttggacggggtacaccccgtggttcgcttcgtcgagaagccgaaactcgaagtagccgaggcgctggtggcaggcggctcacatctgtggaactccgggatgttctgcttcagcgtgaagaccatcctcaaggatttcacccgtttcactccggaactgctccacgcatgcgagagcagctttgctgctggtgctgtattgaccgccgacggatgtcgttcgctcgaactcgagcccggtcagttcaagcgcgtcacggatatctctatcgactacgcgatcatggaaaaatcggatcgcgtttcggtcgtgccgagcaatatggggtggagcgatattgggtcctggcattccatcagcgaactgacggcgccggactcgcagggcaatcgtatctatggcgatgcgctgctgcatggcgtcagcaattgctatatcaagagcgatgatcgcgtggttggcgctgtgggtgtggataacctgatcattgtcgacacgccggatgcgctgttggtggccaaccgggactgcacccaggacgtcaagcatatcgtcgggcaactgaagaagaacgggcacgacagctacaagatccacaagactgcgcatcgcccctggggaacctacacggtgctcgaggagagcgaccgcttcaagatcaagcgcatcgtcgtcaagccgggtgcccagttgtcgctgcagatgcattaccatcgcagcgagcactggatcgtggtgagcggcactgctgacgtcgtcaacggcgagcagataatttcccttcagcctaatcaatcgacttacattccggcaggccacaagcaccggctgatcaaccccggcgtgatggacctcgtgctgatcgaagtccagtgtggcgaatacctgggcgaggatgacatcgtacgcttcgcggatacttacggccgggctgggtaatggcgattggtttgattcgatccgcgtggaattatcgcggttttattggcggcagcgtcaggagagagtttcagtcccgctaccgcaattcgatgctgggcgcagcttggatgatcatcaacccgctggcgatgatcattgtgtacacggtgatcttctcccagatgatgcgcgcgcggctgccgggcgtggacagtcacctcggctatagcatctatctctgtgccggcacgcttacctgggccttttttgccgaagtccttagccgcgcgcagaatgtctttctggagcaggcgaacctgatcaagaagatcagctttccgcgcatttgcctgccgatcatcgttgtgctgaatgccgggttgaatttcgcgattattttctcgctgttcgtggcgttcctgctggcatccgggagttttccgggatggattttcctggcaattttcccggtgttggctctacaggtgatgttctccattggcctaggcatcatccttggcgtgctcaatgtattctttcgcgacgtcggccaactgatgggcgtggtgctgcagttctggttctggctgaccccgatcgtctatccgctgacggtgctgcccgaggcggtgcggccgtttgtggaactgaacccgatgacgcccatcgtcagcgcctaccagtccgtgctggtgcggggcgtggcacctgactggtcgagcctgattccgatgctggtgctggccacagtgctgtgcctggttgggatggctctgttccgcaagcgctctggtgaaatggtggatgaactgtaatgggcgccattgtcgttaaccaggtaggcaaggcctacaagcaatatccgacacgctggtcgcgtctcggggaatggctcttgccgttcagcaaggcgcggcactcgctgcgctgggtgttgcgagatatctcgttcaccgttgcgccgggagaggcagtaggcattatcggcatcaacggggcgggcaagagtacgctgctaaagatgatcaccggcaccacggcgccgaccattggcaatatctcgatccagggtcgggtggcggccatgctcgaacttggcatgggctttcatccggatttcaccgggcggcagaatgtcgtgatggctggccaactgctcggcatgagcgcgggcgaagtgactgcgctgatgcctgagatcgaggccttcgcggaaatcggcgactatatcgaccagccggtaagaatgtattcaagcggcatgcagatgcggcttgcgttcagcctcgccaccgcgaagcgcccggacgtgctcatcgtggacgaggcgctatcggtcggggatgcctatttccagcacaagagctttgatcgtatccgtgcatttcgcgagcagggaacgacgctgctgatcgtttcgcatgacaaggcggcgattcagtccatttgcgatcgagcgatattgctcgatgctggccacgtggcaaaggaaggcgcacctgaagcggtgatggacttctataacgcgatgctggcagctcgggaaaaccagaccgtcgcgcagaatgtcctcgacgacggcaaggtacaaacggtctccggcaccggagaagcgaccgttgccgacatcgctttgctggatgcggacgggcgccgcgtggaggtgattgacgtcggtacgcccgtgaccctggaggtgcgcgttgcggtaagggcgccgattgaacgtctggtgcttggctacatgatcaaggaccgcctcggtcaacctatctacggcaccaataccgatttgaagagttgtcccctgcgcgatgttcaggagggcgatcggataatgtatcagttttcctttccagcaaatctggggcccggaagttattcaattgccactgcgctctgcagcagcgagacccatctcgacaacaattatgaatggcgtgatctggcgctcgtgttcaacgtggtgaacctaggccggccgcatttcgtgggttgcgcgtggctcgatcccaagatctcaatcgtccgggatgcgcccctcgcgtccgcgcaggtaacggaacccatgctgaacagaggctgagcgcgcgctcatctcctatctccgaatctagtttgatgaccatcacttcgtacgctcagaattttgaggatgtcatactctggcgcgccttcagggatgtgcccacgggtttctatgtggatgtcggtgcgaacgatcctgacgatgactccgtaacgaggctcttctacgagcgcggatggtcgggtatcaatatcgagcccgaacggggattctggcggcgtctttgtgaggcgcggccgcgggacacgaacctggccgtcgctgtcggggaatcgcaggggtcgctgcaattccactcagtgccagtacgcggcctgtccacgctggatgaagcgattgccgccgcttaccgggccagtggcatgaaggtgatatcgcaggaggtcgaggtggaaaccctctcggcgctcctggagcgatacgcgagcaatcgtacgatccattttctcaagatcgatgtcgagggtgcggaagcaagcgtactcaaggggctcgatctgcgtgcgtggcgaccgtgggtgctagtggtggaggcgacacggccgaacagcactgaggaaaactatgccctgtgggaaccttccttgctggccaatgggtatcgctttgcctatttcgacggcctgaaccgcttttacgttgccgaggagcatgaaagcttgcggcagaaactcgccacaccgccgaatgtcctcgacgactttgtcatcgatcgcatggtcacggcaggtcgccatatcgagcgagctcatctcaggccggccatggatcgcctgatcgaccaggccgcgcgtcaagagcagcgcctcggcgaatccgagctcagcctagcgcggctggaaggcgagcttgcgcagaagacggaactgttctcgacggagctggagcgcggggcaatggagcgaagagcgcttcttgcacgcctggaggcgatccacgccagcacttcctggcgtatcactgcgccgatgcgcatggcaatgcgtgcactgcgcgcacttgcgcgaccgaagtccagcatgaagtcgggactgaagatcgtgatcaggaaggccgtgccgatcgtgcttgaccaggtctggctgcgtccgattctgaggcgggtcgctgctcgattcccggggccctgggactggctgatgcgtcgcatccgcggggtgattgttgaaacgcccgctgcccctgtcgcgcctcgcctttcggaggaggcgctcctgttcaaggctgccctcaccaaacgactggcaggcaagcgcaatatggtgggaggcagcttctgatgcgtctgctggtcgatctgttcccctgtcagacaatttcgcggctacgcgggattggacggtacacgctggcgttcacgcaagccctggcacgcgtcaaaggcggccatcagctctacgccttggcggacgcgcaatatggcgaagcctacgatgcgcttcgcactgagctttcgcctttgcttggtgccggacatttcgcgacatatgcccactccggtgcgccattcggcgcctgcacgcctgagcagcgacagcttgccgacgacttggtcagcggggcgtatcgcacactggccccggacgtcgtgctttgcatgagcccgttcgaagactgggcccaggatggcgtcgtgccggatccgaggacgcgcgtcggttcgagcctgcgtgccgcggtgctgtatgacctcataccctggctgtttcccgagcagtacctgaatacgtctccgtccttcaaggcctggtacacggaacggctgcaagccctgaagagcttcgatctgctgctcgcgatttcggaggcaacacgcagcgatgccatcgagcacctcggcctggaccccgcccgcgtggccgtgatcggcggcgcggcggacgaacgttttcgtactctgaccgcaggtgagaagcccaaggacttgtcccgcctggggatccaaaggccgtttgtgctctacacgggcaacgccgattaccgcaagaacctggccggcatgttgcaggcctatgcacgcttgcctgaatcgttgcgcagcgggcatcaacttgtcgtaaatcaggtcggtgacaagcacgcattctggcgcgacgcgcaaaggctgggcctgaaaaccgacgacatcgtcgtcaccggtcacgttgatgacactgagcttgtggccctctatcaacagtgcgcggcctttgtcttcccttcactctatgaagggtttggcctgccggtcctggaagccatggcttgcggcgcgccggttatcgcggcggacaattcatcgatcccggaagtgctgggccgggcagatatcatgttcgatgcgaaagaccccgactccattaaggcgacgctggagagagtactgacggatgcacgcctgcggcaggaactgaaggcgtttggccctgagcgggcagccacatttagctgggatgccaccggcaggaaggcatgggaggcattcgaggccaccatgccgctgtcgcgggcgcacgggaatcaggtacttcagatggctgacgcgcgcgccgcgcgctccaacggaacggagggcagcttcccaagcttgggccagatcgcgggactcctgcctgcagacgttcgaatcgaacagccgggcgacgttgacgcgccgcagacgtgctacccggaggaatccgcggtggcgttgagcaatggcctgcccctgtatttttccttgcaggcgaggccgccggagcatctgctgcagcagatgcgtaccaatccgggcgtgctcttgctcggcagcgcggggcttgaagagacgtatccggaaataggggttcgctcgctgctgacttctccagcggacaccgagggctccgctattaatggcgtgccgccgctgcatgatgtggcagcgagcagcctctacatggtcgtcgagaatgatgatgcggcgcggcggctgctcaaccggtattcctgcacgtggtgcccgcccatcgcgacactggaagccgggcacggcgcgcaggagaatctcggaagggtgatcgacgccgcgttccatatgtcaatgcaacgcctcgtcgacgaactggcagacaccctgcagaagatgccgactcccgacgggttgctgattgaccgcctgtctgcctgtgctggccgcaacatgcgtctgaatcgtcagccgcgcctgctgatcgacgtttcgcaattagccagatccgatgcacgcagcggcatccagcgcgtggtccgcaatatggcgcgggagctctgcttgggtggcgagacgccgcccgtggagatcgtccagatcaaggacggcgggctggtgcgtgccagggacgtggtcccatcgattttcaatctgccgtccgacgcctacggtgatgcgtgcgtcgagatccacccgggcgatgtgctgctcatgatcgattcgtcgtgggagcagtatgagcagtttctgccagtctttgatgaagtcaggcagtttggcggccgcattgtctcggtcgtctatgacctgattccggctctgcatccggagtactgcagacccggtctggtttctgttttcaataactggctgcggatggcggccatgcagagcgacatgctgatctgcatttcgcaggcggtaaagcaaagcgtaagcgaatacattgaggcacagggcctgcagccaccgagaccgctcgtgctggaacactggaacctgggtgccgacctgatcgacgatgagagcgacgcgggcatccggccagcggtgctggcgctgatggaagaccggagctcccccacttatctgatggtcgggaccatcgaaccgcgcaagggccacggtttcgttctcgatgccttcgaacagatctgggctgccggcggagacgcccgcctgtgcctagcgggcaaggaaggctggcatgtcgaagcgctgatggacaggatccgcaatcaccctatgaacggcaaacggctgttcgtgatcgacgatttcaccgatgcggagatcaaccgttgctatgcgggcgccacggcgctgatcgctgcttccaccatcgaaggctatggcctgcccatcgtggaggccgccatgcaccgcgttccggtgctggcgagcgacattccggttttcagagaggtcggaggtgaaggcgcgattttcttcagcttggacaatccgtcgtcgctggcggaggcggccgctcgcatcgccgcaatgagcagggacgagcgacaggcgttagcaggtaagattcgccccatcacttggcgcgagagcgcccaacaattggcttgcaagctctatccggatggtatcggtggcagcggaacgccggccagccagcgacacagtcttaactcttcatcaggaacagaaggatgaatcagcgcgtagcagtaatcaccggggtgaccggtcaggacggagcgtatctcaccgaactcttgctcgaaaagggttacacggtctatggcacctatcgccgtaccagctcggtgaatttctggcgtatggacgaactgggtgtgaccaatcaccccaatctccacctggtcgaattcgatctgacggacttgagcacctgcatccggttgctccagaccagtggcgctaccgaagtctacaacctggcggcgcagagtttcgttggcgtctctttcgaacagcccgtgaccacggcggagatcaccggcatcggtgcggtgaacctgcttgaggccatccgcatcgtcaatccgaagatccgtttctatcaggcgtcgacttcggaaatgttcggcaaggtccaggcgatcccccagaccgagtcgacaccgttctacccgcgcagtccgtatggcgttgccaagctctatgcgcactggatcacggtgaactaccgcgagtcctatggcatttttggctcgagcgggattctgttcaatcacgaatcgccgctgcgcggtcgtgagttcgtgacgcggaaaatcacggattctgttgcaaagatcaaactgggcaagctcgatgtcctcgagcttggcaaccttgacgccaagcgcgactggggtttcgccaaggagtatgtggaagggatgtggcgcatgcttcaggccgatgagccggacacgttcgtgcttgcgaccaaccgtacggagaccgttcgtgattttgtgacgatggcgttcaaggccgccggcatgtcgctggaatggaagggcaaggccgaggacgaagtcggcctcgatacggccactggcaaggtggtggtgcgtatcaatcccaagttctatcgtccggccgaagtcgagctgctcatcgggaatgcggccagggctaaggagaagcttggctggcagcccaacacgacgctcgaagagctgtgccagatgatggttgaagcggaccttcggagaaatcagattggcttctcgttctgaggcaacgccgcgagcagcgctgattaccggggtgcatggattcaccggcaggtatctcagggatgctctgtgcgctggcgggttcgacatcgtggggacgtgtgcgcgtcccagcgaatccacatctggcgaagtcgtactcgacatcacggatcttgaacaatgccgtcgggtgatagatcagcaccgtcccgactatatcgctcatctcgccgcgatcagcttcgtggcgcacgccgacacggaagcgttctaccgggtcaatgtgctgggtacgaccaatctgttgcaggcctgcgcggacgtcgggcatcagccgcgcaagatcctcatcgcaagcagtgccaacatctacggcaatgcttatgaagggatcatcactgagcaacaggcgccgcagccggtgaaccactacgcgaccagtaaggtagcgatggaatttatggtgcggacctggtttgaccggctgcccatcgtcatcacccgaccgttcaattacaccggccggggacaggcggatcatttcctcgtgccaaagatcgtgtcgcatttcaagcgtggcgctgccttcatcgaactgggcaatctcgatgtcgcacgcgatttctctgacgtgcggatggtcgccgacgcctatcgcgcattactcgaaggcgaggcggccggcgaggtggtcaatatctgtagtggcaagccgtactcgctgggcgagatcattgccgcgatggggggaattgcgggacagtcgatcgaagtccgagtcaatccagccttcgtgcgtgctaacgaagtcaagctgctgatcgggtctaccgagaggctggacgcgctggtgcccgggctgcagcgtccgtcgttcgaacagacgttgcgctggatgttcgaaggatgagtattctgaaggtggggcttagttccgggccgctctatcgcggcggggacggaatcagcgtctacacagcagcgctcgcacgcgagctggcacagctggactgtgcggttgtcccatgcgtgtactcggagaatggcaccgcggcgcgggcgccggcgcaagcgatacggttttcgcgctcgttcggacagcaggcgatgatgagtgctctcggcgtgcaattgcatgtggccagccggatcgctgtctatcatgccaccgattatcgcgtcgctcgcatggattgccccgtcgtcgcgaccttgcacgatgccgttccattgcggtttccccaatggacttcatcccggctgcggcgtctgaagaactggcagatccgccaatccggccggctcgcggatcatgtcatcgcgcattcgaaggcggcggtgagcgacctgaccgagtacttcggcatcgatgaaagcaggatttcggtggtcccgtgcggggttgaccgtcactggctcgcgccggtggaccgcgcgagcatcgacgctgcgatgacgctatacaggctcgtccccggctattatctttttgtcggcaccttgcagccgcgcaagaatgtcgggcgcatcctgcacgcctatctcgcgctgcccgccagcgttcgtcgcgaccgtcagctggtcatcgtcgggcgtgaaggctggcgttgcgaggccgacgtggcggcgatccgtgcagcacaagcagccggcgagcgcgtgctgtggctggataccgtgtcaagccaggaaaccctgcgcgccatctatgcacaagctggtgtatttgtgtttccgtcgctgtatgagggctttggcctgccgctgctagaagcattcgcgtgtggagttccagtgattgcttcgaacagctcctgcttgcccgaagtggccggtggggcggccgtcgaggtcgatccgctatcggtggaggaactgacctctgccatgatcagactgggagaggatgctggattgcgaacgcggtgtatcgagcagggtcgcaaacgggcgcttgagctttcatgggagaagacagcacgtgcgaccatggatgtctatcgacgtctcgtctgacagattgaattgacatgcgcgttctccacgtattcaagacctattttcccgactcctttgggggcgtggagcaggtcatccggcagatctgccttggcgtcgaggcgcagggcatggaatgtcgcatcttcacgttaagcaggaatgcgaggaacaagccggttatccatgacggggcgaccgcagtctatcgcgcgcaggttagcatcgatgtcgcctccacgccgatgtcgtggtccgcgatgcagttgttcaagcggcagtgcgattgggccgacatgatccactatcattttccctggccatacggcgatctgctgcatacgctcgtgaggccggggaagcccgcgctggtcacttatcattccgatatcgtgcggcagcgcacgctgctgaagctctatcagccgctgatgcatcgctttctgggccaaatgcgagccattgtggccacttcgccgaattatttgggcacgagcgacgttttggcgaagtatcaggacaaggtcagcatcattcctatcggcgtggatgagcaaagttacccgaagcctgacgagcgtttgatggaacactggcgcggcaagctgggtgagggatttttcctctttgtcggcgtcattcgctactacaaggggttgcacatcctgctggatgccttgaagggcaccgacctcagggttgccatcgtgggggcgggtcctatcgagaaagccctgcgcgagcaggcgaaccgattgcgccttacaaatgtgcattttctgggcgccctgccggaagcggacaagatggcattgctccatttgtgcgggtgtgtggtatttccgtcgcaccttagatccgaggctttcggggtcaccctgttggaaggtgcgatgctcggcaagccgatgatatcgtcggaaatcgggacaggcagcagctttgtaaatatcaatggcgagaccggcattgtagtgccacccggtgatgtgagttcgttccgggaggcaatgcaaatcctgacagcatcgccagctctcgcggaggcgatgggtagcaaggcgaaagagagatttgatacactttttaccgccaagcgcatggcggatgcctacgccgaactctacgccgacctggcgcgacaatgacaggtttgggctgtgttgccagtgaccgcgcctggccactattagtaattcgactagtcgaatccctgctggaagccgctgattgagcaggcaactagagcagcattttccggcacaagagattgaataacctactgagatgaatagcctacttaattttgaaaaagcgctgtccggcaggaaggtattcgtcaccggacacaccggttttaccggaggctgggccagcgtatggctgcaagccattggcgcgaacgtagccggctttgccctgccgccggatacgacgccctctctgtttcagtgcctcggcgttgaccagcaaatcccgaccgtcttcggcgatatctgcgactatcccagcctggcagaggcggtccgcgcctttgagccggagctgatcctgcatctggcggcccagcctttggtgcgccggtcctaccgtgagccgctgtcgacgtttgcggtcaatgcccagggcactgccaacgttctggaggcggcacgtgccgtaaaaagtgtccgcggcgtgctgtgcatcacgacggacaaggtgtatctgaaccgggagtggccatggccgtaccgcgagaacgatccgctcggcggcaaggacccgtatagcgcgtcgaaggccgcggccgagatggtgatacagagctatgcggcgtcctatccctggtctgaaaaccgggggcccgccatcgccatcgcgcgaggcggcaatattatcggcggtggagactggtccgaagaccgcctggttccggactttgtccgtgccgtagttgccggggaaaccttgaccttgcggtatccggacgctacccggccatggcagcacgtccttgccctcgtatatggatacctagtcctgatggcggggctgatatccgatcagccaggacgattcgcgcgagcctggaatctcggaccgcaggacatcaggcaatattctgtgcgcgatgtgctggagttgatgagccagcactggaaacgaccggcactggagtatctggacaaccctttgccagaagcaggggccctcgccctcgatagctcgctggccaggaatgcactgggctggctgccagtctgggataccgctcgcgtcgtcagcgaaactgccagttggtaccgcgagttttacgcgaatccggagtcggcgcgagccatcaccgagcggcagatcaattcgtggcgcgagggtatcaaggaatgaaattcgttattggagcgggcggccgtctaggtcaggcattgaccgccttgtatcgagaagacaatgtggttgtcgtcgatcgccagtgctaccgggattggtggcaggatggctcccaggctgccatttcacgttatttcgagcagtggtccggtgtcgacagcacaatattcattgcggcggggattctcgatccgaagatttccggcgaagaccatcttagagtcaatttcctgctgccaaagcacctgatcgaggggacggcccaggcaggcatgcgggtggtgacgttcggtacggtgatggaaaagctgattgccaaccagaacccatacatccacagcaaggctatgctgggccaatacgtggcggagcgcgctgaccggcttgctcatctcagggtgcacaccctctatggcatcggacagcccagtcccttcatgtttctcggccagatttgccaggccctgcggcagcaaacgcctttcgagatgtcgccggggaatcagttgagggaataccatcacatcgaggacgaagttcgggcgattgcaacactggtcgagcagcggtcaagcggcgtgatcgacctgagtcacggtcagccggtacggctgaaggatctggcaacgcacgtcttccgtagcttcgatgcggagtcgctgctgcgcatcggtgctttgcccgaccccggcgacgagaactaccagacgtttttcgagcgcccgaagtcgttgcagaatattcgctttcgtgaaacgcttccctcggttgtggactatctgaaagcctgctccctaggctgggaggtggcgtgatgacggcagcggaacaagtgatggcagagcgcaggccgctgatttcgatttccatcccggttctgaatgaggccgggaatattaatgcgctgtacgctcgcctgacagcggttgccgagaagatgcgcgaccggtgcgatctcgaattcgtattttccgataaccactcggatgacgatacgtgggatatcctgaagcgactggcagccaccgatccacgtgtaaaggcaatccgcttctccaagaactacggcttccagcgctccatttttgcaaattatctccacacccgtggcgatgcggtcatgcagattgatgcggatctgcaggatccgccggaattgctggaatcgttcttcgaactctggcaacagggataccatgtagtctatgggattcgcaaaaagcgccctgaaggatggctgctgaacaatttcaggcgccttggctattgggtcatcgacaagatcagcgagcacccgattccgcgcgatgtgggtgattttcgcctgatcgaccggaaggtgatcgaggccctgtcgggaatccggacgtccagtccttacctgcgtggcatgattgccggtcttggattcaatcagaccggcattccctatgatcgcgatgcgcgggtagcgggggagagcaagttcaatgtatcgcggttggtccggctgggactgactgcggtcttcaaccactccaccgcaccgctgcgcgctgcctcgtttctgggcgctgtcatcctggcggccagcttcctgggtgctctgtactatgtcgtgcttcgcctgtttcatccggaactgccacgcggactggcaagcattcacgttcttgtcctgtttggtatcgggttgaatgcgtttctgctcggtattatcggggaatatatcctgagaatatatctggtgctgcgtgccgagccgatcgccattatcgagcaaagcatcaacttttccaggtctgaactcaaactctagggggaaatcgatgaaggcagtcattcttgccggcggtctcgggactcgaattgccgaggaatcggataccaagccgaagccgatggtggaggtgggcgggcggccactgctctggcacatcatgaagatctacgcgcatcatggcatcaaggacttcatcatttgcctgggctacaagggctatgtgatcaaggaattcttcttcaactactatcggcacatggccgatatgcagatcgacctcaagaccggcgatcaccagatcctgaacagccagtccgaggactggcgcatcacgctggtcgacaccggctccgagacgatgaccggcgggcggctgaaacgtgtggcaagtcatctgggcaacgataccttctgcctgacctacggagatggtttgtccaatatcgatattacggcggagctgcagttccaccggcggcatggaaagcttgcaaccgttgccgcggttcaacctcctggccgttttggcgtgctcaatctggatgccaaccagaatgtctctagtttcgaggagaagcctcgtgacgaaatcggctggatcaatggtggattcttcgtcctggagccgtcggtcgttcgctatatcgaagacgatgcgacttcatgggaagcggcgccgctaatgaatctcgccaaagacggtcagcttgccgcctttcagcacaccggattctggcagccgtgtgacacgctgcgcgataagcgcgaactggagagcctctggaacaagcggaaggcgccctggcgcatttgggaatagcgatgacggaaggcgggaaaggaaggcgtgactggataaagcaactggtgggaggggcgatcaccctcgtctgtctgttcatcattgccaggcaggtcgatgttggcgaagtcgtcaaggcactcgagcattttcattggccgtttctcacgcttggcattgcatcactgagtctgggctacgggctcaggattctgcgctggtcgctgatgctacgtgccgcgggtgccgacgctaagtggcggaactgtgccacgccgtttcttggctcgattgccttgaataacgtgctgccgttgcggctgggtgatttgatccgtgctttcgtgtttcccaatgccatgggaatcagcaagaccacggccgctagcagtctgttgatggagcgcctgatcgatctcatgacgctgctgggctgtcttgcgatcgggctggtggcgagtcagggtacgcgcttgccgggcatgctggctgaatcggtcgtcggcatcgccattggcggcggcgtcatcctgattgccggttttctattcagcggaagactggccaacctttgtcagaagttcgcgcaggggaatgcggcatcgcggccatcggcaagtttttcgcgagccctgctgatactggccagcttgctgcggagtttcgaggcgatgtcgaggccgcgtgtgctattgactgtcgttgcagtctcgatgctggtctgggccggcgaatcgggtctgttctatttcgtattacggggtttcggatttgatgcaaatccggcccttgctgtggtggtgatggcgatcgcaaccctctcgacgctggtgccctcatcgcctggctatatcggtccgtttcatctggctgccttcacggcggtctcgctgctcggtggtacgtccgcgcaagcaggaagctatgccgtactggtccatctagcgttatggctgcccaccacccttgccggcgcagtggcaatctggatgcgcccgtcactgttcagggcaatccgctccggaccgaatcccgaattgaagattaattgagtggtaaaccatgagtaattacgatgtcgttgtggtcggtgccggctttaccgggctgacggcagcttatgcccttgccaagcagggaaagaaggttcatgtcgtcgaggccgatgctaccccgggtggactggccggaacgttcgaattcgccgatggcgtcaagctggagaagttctatcaccactggttcaacaatgacgtctacgtcccggaactggtgaaggaactcggcatggagggggatgtgattcttcttcctacccgcaccggcatgtacttcaacgggcgcatgtggaagctgtcgaccccgctcgacctgctgaagttcaaggcgctatcgttcatcgaccggatccgccttggcttgctcgtattccaggtccgtcggatcaaggactggaagactatcgagcatctgagcatccgtgaatggctggagccgatctgcgggaagaccgtctatcggatcgtctgggagcctcttatttcgtcgaagttttccgtttatgcggaagcagtcaacgctgtctggatgtggaagaagctggtactgcgtggcagcaccaggaatgacaagggcggcgaggaactcgcctacttcaaggggggctttggccggttggcggaggcgatggtcgcggcaatcgaacgggccggcggcgaggtcacgtttaagaacaaggtaaatggtgttcttgccgacggcaagaaaatcacgggcctggagaccgagcaaggcgaactgaaggggaaacagtatctcttcacgccgtctttcccgattattgccgacatgtttgaaggcacagccccgcccgagtggctggcccgtcttcgccgggtacgctacctgggcaacgtttgcctggtgctgcgccttaatcagagcctttcggaaacctattggctgaacgtgaatgaccccggctttccttttgtcggggtaattgaacacaccaacttcgacaagccggagaactatcagggttctcatattgcgtacctgtcgcgatatcttgcggtcgaggatccggtgtggggctacaccgatgagcaatatgttgacttcgcgtttgagcacctgaagcgcatgttcccgaagatggaccgctcctggattgtcgaacaccgtgtgtggcgttcgatgtacgcacagccggttaccgagagacagtattcggagtatgtacccagcgaggagacgccctacgaaaacggatggatatctaccatggcgcagatctatccagaggatcgaggcacgaactacgccatccgcgagggcaagagaatcgtcgagaagcttgcgtagtgggatcgttggacggggacgtttctggaactgagaaaatgcaaaaaaatctatcggcatttcagatagggttgatggcagcagtggccgcgatcctcattgttttcaatgtggattcgatgtggagccagagtgtcgatttggctcatcactatgcactcgcattcagaatttccgaaaactggaccttgacgcccggggacccgtcgattgcggagatgaatttctatccccgcacaagccatatcctggcggcgattctcgggctcatctttaattcaacgttcctcggcattcatttgcttagcctgattgcacttgtcgtgctctggggttctgtggtctttgtgctcagcacgctgccgcggcgtgttgccagtgtgtccattctcgcattgacgacactgctggtcctgaatcgcgtggtgcttcggctcgaaatccatggtgcggagatagatgataattttttcttctcgcagctagtcgcacagggaatggtgctgctgattttggcggtcgcagtgttcgtggaggtgcactcgcgcattagttatgccttcggcatctttctggtggcggccgtctatatcgttaccggaacacatctcctgcctgcgctcgaattgctcggggtactgctgggcatcgtcatactgaatgcctggactcggtcggccggcacactcgggaatcgagtgcggacttatctttggtacgcattgatcgccatttcagcgatagcagccacctttttgaatccagcattttccgcgatgcggaaaatttctgagaataacggtgctttgcatctggtgcgaattccgggtgcagggatgctcgtgacgctagcgttgctggtggcagtagtttccctggcgctaatgatcatatggtggcgctccggaaaagacacggtgcgcttcaatgtggcacttaagtacttcggactttacggcgggtcgattgcttgcctgtgcatatgccagattgtgctcttgcgatttggatatggcagcgaatatgcggctaagaagtatgcctttggtttgtcaacgcaattatttatctccgctgcaatcctgattggcctttacttcaatcgcggccgtgccacggaggaccagggcggatggtccggcaacgagcatggtttatctttgctggtgctggcctcattcaccggcatcatcctgttgatacttccatcctcgaaacggctagatacttcggatgtggtctccctcgagcaccagctgatcgttcttcgtgatgtcggactgtccccgtcgagtgcaaagcagaatgttgtaattggcttgcgaaacatgtcgccggttatcaactacatgttttcggttgccgtcgcaaagacctatagagaatttgcgatagacgttttgatgggaaacaagctgggcaatatctcaagctacggcactattctgacttcgacggggtttgcgccgtattatcgcgccgattgtgcgcgttctgtcgcatcgggcgctgtttctctcgttgacgccacctgcatggcagaatcgttggcaaagccggaaatctgcaagggcaagcttgactttacttcgaggggctggatgaatgcgtctgctattcccggattcagctgggcggaggatcacgggcgctggacagatggtcgaagtgcagcgatcacatgttcggttagcgacgacatgccgagccgggtgaagattcgtctggcgcctttcttttatggtagccaccgtacgcaacgtctcattgtcaaggtgggatcgtccagcagcgagtacagctttgcccaggaaaacgcgccaggatcgatcgatgtggccctcccgcagacgcggccggatgaaaatctgaccattcggttgcaaatgccggatgcaatttcgccgatgcaggcaggaatgaatccagacgaacgcatgctgggattcctgattgaatcggttacgttcgaataggatcttgacctcgggcctaggagactcgccgtggttgtgtcacggcgagcccatgaccgccatcctcaagcggacttgcggcgcctgatcagtgcgatcgccttcatatagatatctatcacgcggccctcgctaaagcgcgcatccacatccagtcgtccggccttgcccatttgccgcagcgtttcctcctcgctttggcaaagctcgagcatggtttgcgagagatcctctgcactgcgtgggcgacacagtcttcctgttaccctatcgcgcacaacgtcccggcatcccggcacgtccgtggccacaatcggcttctccattgaagcagcttcaagcagtgtgcgaggcacgccttcgcggtatgagggcaaaacaatacagtccgcctgcgctatggcccctctgacatccgttgctgtaccaagatattcgatgagcccttcatcctgccacgccaggagttgcgtccttgaaatggcgctggggttctcgacatcggcaggcccgagaagctgaaaccgggctgtcggatagacggcacgaatgcggcgtgcagcctcgacatattcgccgacccctttgtcccatagcattcgcgcaatcaggaggaagcggaatgtgttgttttctcgtggctgccgctcgcctggtgtgtagtgctcgagatcaatcccttcgctgggaagcacaaaggttcgttgctcgctgaccaagctccgcttgacgaattcgcgacggtcgtcttcgttgagaaaccatacttgatgcactgagcgcagcgccagacggtatagcgcgcgtccgattcgtgcgacaaagttattgttgatgaaaacgaagccaagcccggtcgtcactgcaatgcacgggacgccggataaccttgcggccagcgagccataaatgttcggcttgatcgtgtactgaaatgcgcagtccggtttaagctgcctatacaacctggtcaactggctgaagcacttccagtcagctaacggattggcactcctggccgatagtgtcagagggtggaattcgcagccaagtgcctgtaacgcttcagagctgcgatccacaggtgcaatgatactgaccttcgctccgtgcgcgagtaaagcacgcacgaccccgccacggtactgctgtatagaccaactcgaattgccgacgaatgctatatggatgccgtccagatgcagcttgccgggctgatgggccacctcttcaaatcgctttgataccgcgtgggccggatgttcgtcaatactgttcagcatccttgtcacatgccaattcggcggtcacacagggccaaaaagttgcggttgtgctccgtcttgcattcctgattccttgtacagaagatctgcgctgaagacagtggattttagcagaacccctgcaagggcccccttatgggctactgtgtcaccgcacaaccaggagaaggcgctccgggctgctacgagcgatctggttgcggtagcattaccagctcacgcagcttgctttgcggcatcagactcgcgagccagcacgacgaaccccaagctcacaacaaccgccagtgcattggccgctatatatccgtagaccgcaccctgcacaccatacttggggatcgtgaacaggtcgacagcggctgttgcaactaacacgagcagcgatttgcctactagccaagctggcttgcgcagatggacggcaagcaaagccaagcccgcatccgcgaagatcagtccagaggcaatggcgccttgctgcagaaggttcacagttgcctcaaaacgctcaccatacagaagttgcacaatccacggtgcgccgatagcaatgagaataccgcccgccattccgatcgccgccatgcctcccgccacacgcaagacgttgtaacgcgccttggccaggctcggctgcgcatagaccgcgagcggtgcaaccgcgctcgcgatgattgtggccagcagggagaaattgtcaagtacctgcatgcacgccgcataggccccaaggtcgactaaggggacgcgtggtttcagcagcaactggtcgatccgccgcgcgctgaacagaaggatcatgctgatccagaatacggagccgtcgcgcaccaggcggataagcaatccacgatccggcgagattcggatacgtgggcgccggcgggcatagtaccaggcgagcatcgttgccagcagtcctgattccaaggcaaaggtccaggcgtactcgtggacggcgtgcacggcggaaaaatagagtgcagcgatcaggacagccttgaacgccagcgcggacaggctgaagactacgctagggcggttgtcggtgtgcgcctgcatccaggccgtcacgacaccgaacggttcgcgcagcaggatggaaatacccagaatggctgcgatatgcacggtggtggcatcttgcccggtcagcacgctgctcacgagcagagccaggtagccagcaatggaggcaagcgcacgcaggccgaaggcatgtgcgatcagatgggactgggcatccggtgacggatgcgcgaccagccgcggcacaacaacttcagcaccacaaatcaacccaatcgacgccgcaatcagcaccagcgactgcgcatactgaaaatgcgcaaagccctccggtccgacgccgcgtgcaatcaacgccacgatggcgatgctgacagtgatctgaagagcccgctcgcccagcagccagacgacattgcgcgcgatctgcctacgcatggtcggccttgccgggagcgggcagcgcggctccccgacgctgcacgagttcccgatacaggtcgatccagcgctgcgcgacactggccaggctgtatgccgcaacggcgtgggcgcggcctgccgcgacatcctgccggcccagcagggccgcacgcatgccgcgcgcaagcgcatcggtgtcggctgccggcactatgctgcccgacgccgccagcagcgcgcggatgcctgacacgtcggtggccaccaccggcgtttcgcaggccagcgcctcggccaccacgaggggcaggccttcgcgaacggaagacagcacgaacaggtcggcggcgtttatcagcgcggggacgttgtcacaagggccgagcagccgcacggcgtgcgagagcccgagcgccgcggcgtgccgcaccagcgtcgccttcagcggaccatcgccggcaattagcaagcgaatgcttgcgccagtttccggatcgcccgcaagttgccggaacgcttcgatcaggcgctgctggtctttctcatggaccaggcggccgacattgagcacgacctttgcatcggggccgagtcccagcgcctgccgcgtctgcgcacgcgcctgcgggtcgcggcggaaccggtcggtatcgatgccattgggcatcacgctgatccgcccggcggtcgtggcaccgacgtccagcatgtactgtctgccttccgcgctgacatgggtggtggccgcacacaagccatccgtcaaccgatacgccagcatgcgcagcctgcccccctcgcgcgagctgtgcgcggtgcagaggacggggatgggcgcgccaccggcccgctgcggccgcagcagccgcgcgaagatgttggcgtggaacatgtgcgcgtggacgatgtccggctgccagcgcccgacccacttgcgcacggcctgcaaggtgagtaggaaacgcagtgggtctttgcgcaggtcgacgcgatgcagcgtcacttccctgggcagcgccacctcttgcgccagggtcaggctgactacagccacctcatggccgaaggcgacgaactggcgtgcgaggtccgcaacctggcgttcggcgccgccaagccgaagtcctgtcgtcagcagcaggatgcgcatcaggcggggagatagatcgtgtgggccacaccgtgcattagcgtgcgccgtagcctgtcagcagtgtgcgcatggtcttgccggcgatcagcaggtccattgccatcgagcaatgcttgacgtagtagaggtcatagcaaagcttggtgacggtttcctcgtggctcgcggcatagccttgctggacctgcgcccagcccgacaggccaggacggaccaggtgtcggtagggatagaacgggatcgtctcggagaaggactcgaccatcgaggactgttcgggacgcggtccgatcaggctcatgtggccgaccaggacattccacagttgtggaatctcgtcgagccggtatttgcggatgatcctgcccacgcgcgtaacgcggggatcggagtgcgcggcgaactgggcttcggtatccggttcatcggtcatgctgcggaacttcagcatcgtgaacactttcccgtaaaggcccacgcgttcctggcggaagatggccggaccgctcgactccatgcggatggccagggtaacggccagcccgatggggatggccagaggtgccagcagcagcaccgcggcaatatcgcccagccgcttgaacggcgcatagaggaagttctgtgcgtggtcgtccaggaagttctcgtcgatgtgcgtgagggccaggcggccggtcagcagttccgcgatccgttcgaccgaatagacgtggacgtggctaagcttgtagcgggccagggtacgggtgcgatgcgggtcgacggcagcgctgcgctccatcatcaggccgtcgcagtcggcggcttccgccagcgtggtgatgcggtggaactcggcgtgccagttgcgcgctgcgccaggcatcgccagcagttcgtctaggtgttcgagggcctggggatcggtgtagccgaacttcggtacgtagcggcgcacgaagcgcaggtagccactccacagccagaccattgtgatcgtcatgcagaccagcatcgcgccacgtgaataatcgatgcggaaaaccgcacaggtggcgaggaggactgcgaagggcagcagtgtcgcaagcgccactatgctgttcccctcgactggcggaatatagatagtgcgatccagcagcatgaaggcgatggcatacggcaccacggacaggccgatggtattcaggaagacttgcgtgacccagccgtggcgggcggcttcatggcccccgagggcggccagtccgtacagcaggaggcccagggcaccccatgcgagcatgctgcggcggcgggtggtttctgacgatatacgcgttggcagcttcatcttgtgatgctcggctggcgccaaggtatgaccaactggctctggggagtacgacatacggacaggaacaggctggccaggaacaatggcgccgtcggcaccggaatcgttggcctgcaaaggccggggcggtctgtcggggtagtgccaacaacgggcatactgccacgagcaaaccagcggagcgcattataaaccccccaggaaaccggcccccgatttcaaatccggcacaatagcggctgagttgacttcttgcgactgcggcggatcgtcgcgtatttggaaaaaactatggcaatcgaccccaccatgttcaaggcttatgacatccgcggaatcgtaggcaagaccctgacgcgcgaagtggctcgggatataggctggtcctttggcacggccgccgccgccgagggcgaaaaaaccgtcgtagtcggccgcgacggccgcctctccggccccgacctaatctccggcctggtagaaggcctgcgcgccgccggcctggacgtgatcgacatcggcctggtcgccaccccgatggtctacttcgccaccaacatcgagatcgacggcgtccgcccgacctccggcatcatggtcaccggcagccacaacccgccggactacaacggtttcaagatggtgctggccggcaaggcgatctatggcgagcagatccaggcgctgcgccagcggatcgaagccggccagttcagcagcggtgccggcacctacaagcaagtcgatgtgcgccaaaagtacctcgaccgcatcatcagcgacgtcaagctggcccgtccgatgaaggttgccctggatgccggcaacggcgtggccggtgccttcgtgggtgacctgttccgtggcctgggctgtgaggtgactgaactgttctgcgacgtggacggcaacttcccgaaccatcaccctgatcccgcacatatcgagaatctgcaggatctgatgaaggccctgcgcgagacggactgcgagcttggcctggccttcgacggtgacggcgaccgccttggcgtggtgaccaaggacggtcaggtgattttcccggacaggcaactgatgctgttcgctgaagagatcctgtcgcgcaacccgggcgcccaggttatttacgacgtgaaatgcaccggcaaactggccccctggatccgcgagcacggcggtgagccgctgatgtggaagaccggccattcgctggtcaaggccaagctgaaggaaacgggcgcgccgatcgcgggcgagatgagcggccacgtgttcttcaaggaccgctggtatggctttgacgatggcctgtacaccggggcgcgcctgttggagatcctgtcgcgccacgcggatccgagcgcggtgctgaacgcgctgccgaatgccaacaacacgccggaactgcagctcaagtgtgccgagggtgagccgttcacgctgctggaccagatcaaggcgaacgcgaagttcgaaggggcgcgtgaggtgatcaccatcgatggcgtgcgcgtggagtatgccgatggcttcggcctggcacgcccgtccaacaccaccccggtggtggtgatgcgtttcgaggcggataacgacgccgcgctggcgcgtatccaggcggagttcaagcgcgtgatcctggcagagaagccggatgctcagctcccgttctgagcgcgcgacggtgccggcggcatcgtcggacgcggccggtgtggcgcagcccacgccggccgcggtgcctttcacactgccggaacggccgcgcatcctgctggtcaaggtgtcgtcgctcggtgacgtggtgcacaacatgccgctggtgcacgatctgcgcgcgcgctggccgggtgccgagatcgactgggtggtggaagagggctatgtcgagcttgtccggctgttgccggaggtgcgccgggtaattccgtttgcgctgcggcgctggcgcaagcgcatcctgcagggcggcacctggcgcgaggtgggcgaggtgcgtgacttgttgcgccaggagcgctatgacgcggtgatcgaaagccagggtttgctcaagaccgcggtggtcgcgcgcgtggccgcgcgggcgcccggcgcgccgattatcgggctgggcaatgccacgcagggctccggctatgagccggcggcgcggctgctatacaccgatccggtgcgcgtgccacgccagacgcattcggtgcggcgctcgcgcttgctgggcgctgcgctgaccgggcttgtgccggcggagccgccgcagtttttcgggcctgccgcgcagtcgctgcatgtggacgatccgctgtggggcgatctgcctgcgcgctatgccgtgtgcttccatgcgaccgctggcgcgcgcaagaaatgggcggtgcagaactggcatgcgctgggcaggcggctggcggatgagggtctggtgatgttgctgccgtggggcaatgacaaggaacgccaggctgccgaagagatcgctgctggtgtgccgcaggcgagggtgttgccgcgattctcggtgatgcagggtttcgggctgatcaacggggccgaggtggtgatcggggtcgatacgggcctggtccatattgccgcggcgttgtgccggccgacggtggagatctatacggccacgtggcgctggaagactgagggctactggtccgggcgcatcgccaatgtcggtgacgacggcgtggtgccgtctgtcgatgaggtctacgacgcggcttgccgcgtgcgcggagtggctgcctgatgctgcgtttgctctatagcatgttatgggtggtggtgctgccgctggcgctgctgcgcctggcctggcgtgcgcgcaaggagccgggctacttgcagcatgtcggcgaacgcctgggtatatacggcagcctgccccggaaaggtccgtggctatgggtccacgccgtgtcggtgggcgagacccgcgccgcgcagccgctgatcgaggcgctgctcggcgcctatccgcaccaccgcctgctgctgacgcacatgacgccgaccggccgccagaccggtgcgcagctgttcggcaaggagccgcgcatcctgcaatgctacctgccgtatgacctgccatggctggtggggtgtttcatgcggtatttccggccgcaggcgggcatgctgatggagacggaggtgtggcccaacctggtgcgcggcgcgcgcaaggccggagtgccgctgttcctggtcaatgcgcgcctgtcgccgcgcagcttccggcgcacggcgcggtttgggcgcgctgcggcggtcatgtatgcggattttgcgggcgtgctggcgcagacggcgggtgatgccgagcgctttcaggcgttgggcgtgccggcggtgcagatcaccggcaacctgaagttcgatatgcagccggcgccggcaggcgttgcgctgggcgagcagttgcgcaaggtcattggcacgcgtgcggtgctggcagccgccagcacgcgcgagggagaggagccgatgttgctcgacgcgttctcccgttggcaatcactggcgggcgatgtcccgcgtcccgctctgctgctgatcccccgtcacccgcagcgcttcgatgaagtcgccgcgatggcggcgcgtgcggggttctcggtcgagcgccggagtgcactggatcttgacggcatccagtcgccgctgactgccgatatcgtgctgggcgattcgatgggcgagatggcgatgtactttgctgcgtcggatcttgcctttatcggtggcagcctgttgccgctcggggggcagaacctgatcgaagcctgcgcggtcggcacgccggtgctggtcggtccgcataccttcaactttgcgcaggcgacggaagacgcgattgccgcgggcgcttgcctgcgcgtcgacaatgccgatgcgctgatgcgcatcgcggcaagcgtgctggccgatccagcccggctggcggatatgcgcgcgcatgcgcagacctttgcaggcctgcatcggggcgccaccgtgcgcaccctcgctgcgctggccccggcgctggaaggctgatccggtgcctaccctggtgccttgaccagggcatcccactgcagcgcaagccgctccagcgtgaattggcttgccttgtcgcggccgccggcgccaaggcggctcgccagttccggctggcggatcactgtcagcagcgccttggccagcgcatcggcatcatccgcggcaaccaccagagcatcctgccccggggtaagcagttcgcggggtccggtctcgcaatcggtcgatatgatcggcaggccaaaggccatcgcttcgatcagcaccagcccgaatccctcatagcgcgaactcaggcagaagatcgatgcatgcccgtaggcctgcgccggatcctggcagatacccggcaggctggcccggtcttgcagttgcagctggccgatcagtgcagtgagggcagggcgctcttcgccttcgccgtggatgaccagttgccattccggttccgcttgcgccaccttctgccaggcgcgcagcaagacatcgaagcctttcgccggaaccagccggcccatggccagcacggtcttctgcatgcgtggcgcgggttcggccgggatcggaaatggcagcggattcggcaggcagacgacctcgctgcgcggccgcagtgcctcacgccagcggcggcggtcccgttctgtcagcacgaccacctgccggcagaactgcgcggccagccgacgtgccaccttgcgtgccggcttgccgagatcctcgtcgaaatggcaatgctcccacgcgatatggtgcaggcccaggccgagggtggcaggcagcacgaagagttcaagcatggtgtcgacctgtaccagcacatcgatgcgatgcgcggtgcagtgcctgcggatgccggcgaccgtggcgaaataggcgcgtttgaaggagggccgttgcgcgaacagcgcttcatggtgcacgcgtggatgcagagggaaccggctggcagcatcccagaggctcaggatcgtgacacgatggccaagatcggccagcgcattggcgatcgttgcggtcatccgctccgcgccggccatcgcgttcaaggtaccggtcaggaagcagatgtggcgtcgtgagtcctggctcaactggccgcccgcgcaggcaatgcgtccttgcgcgcaaccacataggcaaagcaaacggccatgatcaggctgtagaaggcattgaccagggtcgtggcgaacatgacctcggtcaggccgaacaccatgaagccgcagcacagggccaggcccatggcgctggcaacctgcgtgccccggtctgcattgccaaggtggcgcaggaagaaggcggccggtaccagatacagggcaaggattgccagtagtcccgggatgccgagtgtggccgtagcatgcaggagttcgttgtgtgaatgcggcatggtggcagccagcggggtgatcacatgctgcgcctcaagcgtttgcaaggtccgctcgaagttctctggccccacgccggtccaggggtgagcctgtatcagttccagtgaggctcgccagagctgtagccgtatcccggttggggtgtccggggttacatgctgagcgaattgagacacttcggatacaacgtctgccgtgcgctgctgcacgcgggcgctgccgagccacgcgaggcccatgaggccagccagcccaaccatggccgccgccttgtgcatccgcgtcagcctgtgtgatgcagctagcgcaataaatgccagcacggggatggcgagccagccgccacgcgtgccgctcatgtatgaggcgtacaggccggcaaagcctgccagcagcttcaggcccgattgcaggtagtccctgggacgatcccatccaattgaaatcagggcgagtattcccatcagcatggaaagattgctaaggggaatgatattcgaggaccctacgtgaactgggcgaccggcagctgtcgcctcgtggatccaagccgcggaaaggagtgcacagaccacgaaaccccactgcacgctccgcatcccacccctgccaagccgtaccatcccaaaaaccaacggaatgaacaaagcaaagcgcaggtaaaggtaagaaacatgcggctcctccgcccccgacagcagttgctgcaacagcactgccagcggcaacgccgccatggccagcatgaagaaccagtacctgcgcaacagccccccacattccgtccggccctcgcgcccgccggcaacgagagtgatggcgctccagccgagcaggagtccgtagcagaggttgctaaccgtcggcttgacaaacatcagcgcagggaacgctgccagaacggcacaggcggccaggtacagagctttgtcgaccccatacgattgggatctctgcaatctcgtcatcaagagcatggagagaggtttccggaggaagggttgtgcactcgggatgcgggccgatccatccttcttattattttgttgccgcctgttgagcagcggagcctgtcggtcacattgctgcgccgggcgaggcaattatatcggatggtcagggtgggatttcttgatgtttcgcatcctagcccgccgaaccggttgggacgttacagaatgtatgtgattcaatcgatgcttcaccggcgctttggcgcaaccgccttgctaaactgatgtatcagtagggtgcacttttcggcatgccctttgtcagatctgtcgattgcatccatgcggccgtcttgagcggcctgttacaggagtccttcatgcacagccgtaccagcctgttccccttctccctggctgcccgcagcgcggccgccttgctggtggcagtcatgctcggggcctgcacgaccgcgccggcgcctgatctcccctccgccggcaccaacctcaaccagacccaaccctccggccccagccgctgggaactggtgcgctggcagcagcccgacggcgcgcagcgcgatatcccgcacggcgacaacggccagcccatcatttttgagttcaatgagggcatcgatgccgcgcagggcacggtcagcggtaccagtggctgcaaccgctttaccggcagctatggcaagaccgataccggcatccgcttcgaccgcatcgccggcacgcgcatggcttgcccgccgccgcgcatggaactggaatcggcgttgctcaaggcgatgcagacgccgtttgccacggtcggcacgcagccgtcggcgggcagcacgggccggcagatcatctggaagaccgccggcggcgacctgctgcagtttgtcgagcgcgaaggcgtgggcaggcgcggtgcgagcgtggaggccggcggcgtggagaaggtggtctatatcgattcgcagcgcgtggagtgctcgggcgtgggcaagatgacgtgctaccgctggcgcgaatcgccggaggcgccgtggcagctctggtatggcccgatcgaggggctggattttgagccgggcgtggcctacacgctgcgagtgcgcgagtaccaggtgccgaacccgccggcggatgcgtcgtcgatccgctggcagctgctgaaggtggagtcgcgtacgcgggcgaagtagtgcgacgccgttcacgcaaacgggccgcagttgcggcccgtcttgctttgcggcgtgctgcggaggatcaggagcgcggtgcgccggcaggcgtggcttcgcgccgcgtgccgcggcgctcgaccgaggcgcgcgggtttgccggggccctggcgccggcctgggcgggcgcgggcagcttgtacagcgcgcccggcgaagaggtcagcagggtgttgatctgcaccacatcggcttcctgcagcacgccagtggaggccttcagcctcaggccgttcatgatggtgtcgtagcgggccttggccaggtcgcgccgggtcgaaaacagttgcgcttcggcgttgagcacgtcgatattgatgcgcacgcccacttcatagccgagctggttggattccaccgcactggtggccgagcgttcggcggcttccagggccttgacctgggccaggccgttggacacgccggagtaggtctggcgggccgtctgcgcggcgctgcggcgcgcgaattccaggtcgctggcggccttgtcggccagggccagggtctcgcgcacgcgcgactggatctggccgccggcgaagatcggcatggtcagctgcacgccgatctgcgaggcgttgtaatgggtggagatcgcctgcgtggcgctgccggtctgattggtgaagccgtacgaggccaccaggtcgaccgagggcaggtggccggccttggccttgttggtttcgcgctgggcggtttccaggttgtagctggccaggttcacctgcaggttgctggtctctgcctgcgcggcccaggcgttgacgtcgggcggctgcgggccggggatgggtgcctcggggcgcaggcccagcacttcgtcgaccggcttgccggtgatctgctgcagcgtggcgcgcttgatctcaaggtcgctctgcgcggcgatttcggtcgaggtggccaggtcatagcgggcctgggcgtcgttggtgtcggtgatggtggcggtgccgacttcgaaattgcgcttggcctgctccagctgctcggagatggccttcttctgcgcgcgtgccaggtagaggttgtcctgtgccgccagcacgtcgaagtaggcctgcgcgctgcgcgtgatcaggtcgagctcggcctggtggaagctgacttcaccggccagcgacgccagttcgccctgcttgtaggtttcccagcggtcccagcggaacagcggctggctcagttgcagctgccagttgttgttgttgaagaagcgcgtgccggaggcgctggccccggcgccgaccggcagcgaagcggtctggtcgagcttggtgcggttggcgcccgcggtgccgaccacctgcggcagcagcccggcgcggccctggggcagccgctcgcgcgtggccagcagctgcgagcgcgcgctggcaaactgcgcgtcattggcttgcgcatcgcgatagacctgcagcaggtcggccgcgcttgccggtgccgccggcatcatggccagcagcggggcaagcagggaaaccgcgatcgccaggcgtgtccggatcactccgggcagggcgttgggcgcaaacgtcatgaaagctccaggttgccgggcgcgggccgcggctacagtcgattcttcttggtgttgctgtgctggactgccgcttcagtacttcggcatggccgggtcgacatcgctggcccaggcgtcgacgccgccggtcaggttgtagaccttgccgtagccctggcgctccaggtaggccgccacctgcatgctgcgtgcgccgtggtggcagatgcagacgatgtcggcgtcttcgtcgagttcggccgcgcgcgcggggatgtcccgcatcgggatgtgggtgatgccgggcatggcgcaggtctgcacctcccagccttcacgcacgtcgagcaggaccggcttggcgcggctggcatcggccagccactgggccagttcggtcgctttgatgacctgcatggtggatctgtcctcagaactggaattgcgacggccgggccgcgccctgcaggggcttgaccgcggtttcgaacaggttgacgacctggtattcggtctcggacacgcgtgtgaccaggcgcgcttccattaccggcagttcgccgatgaaggcggcgatgcggccgcccaccttgacctgcgacaggatcgactgcggaatcgccggcagcgagcccgagatgcagatcacgtcgtagggcgcggcggcgctccagccgtcggcggcgttgccttcggccacgtcgacgttggtgacgcccgcgttggccaggttggtgcgggccagctcgaccagctcgggcacgatgtccacggtcagcacgtggcgcgcgcggttggccagcagggcggccatgtagccggagccggcgccgatttccagcacgttctcatgcttgcgcacggccaggtcctgcaggatgcgggcttccacgcgcggcgccagcatgttctgcccggcgggcagcggaatctccatgtcgacgaacgccagcgaggcgtacgcggccgggacgaactgctcccgcttgactaccgccagcaggtccaggatttcctggtccagcacgtcccacgggcggatttgctgttcgatcatgttgaatcgggctttttcgagatccatcttgccattccttaccaatgccaaccgctgtcggtctgtgcgccggccgcgcggtgccacggccggacagtcttatcaaaccctttattttaaccttgcagacgccgccaggctcattccgcgctggcctccgccggggccgggcgatccggtgccgcttgccggccgggcgcgggctgcgcgtgcgctgcgggctcgctggcgggcttgccttgccacagccggcgcagccaggcgccgaaatcatcaagatacgtatagatcaccggcaccaccaccagcgtcaggatcgacgaggtaatgatcccgccgatcacggtctggcccatcggcgcgcgctgctcggcgccttcgcccaggctgaaggccagcggcaccatgccgaagatcatcgccagcgtggtcatcaggatggggcgcagccgcacgcgcgcggcctccaccagcgccgcctcgcgcgacagcggctggcggccgtcgccaactccaccctggtccacatggccctggcgcgcctggttggcgaagtccaccagcaggatcgcgttcttggtcaccagccccatcagcatgatgaagccgatgatcgagaacatgttcagcgtcgagcggaacagcagcagcgccgcgaacacgccgaccagcgtcagcggcagcgaggtcatgatggcgatcggctggaagaagctggcgaactgcgaggccaggatcatgtagatgaagatcaccgccagcgccagcgcggacacggcgtagccgaaggactcgttcatcgacttggtcgacccgccaaagcggtacttgtagccggccggccagttcatgccgtccagcgcggccttgacgtcgcgcgcgacttcgccggccgagcgcccggccacgttggcggtcagctcgacctcgcggttcaggtcgcgccggctgatctggttggcgccggtggtcggcaccagctcggcgatctggcgcagcggcaccatcctgggcgagccgtcggcgttggtctggctgctggcgatcatcagcgcgctcaggtcggccatgccggtgcgcgcgtccctgggcaggcgcacgcgcacgtcgtagttctcgtcatcgggcgcgcgccatgagctgatggcgtcgccggccagcagcgggcgcagggcattgccgatctgcgccacgcccacgcccaggtcagaggccagctcgcgccggatgcgcacctcgatggtggggcggtcgtccttcatgctcgaatccaggtcggccaggccgcggatcgccttcatgcgcgtgccggcttccctggacaggcgccgcagttcgtccaggtcatcgccctggatcgatacctggatcgccttctggccgccggcgccgtcgggcatgcccaccagcgtcagcgtgatgccggcaatgcccgccaggcgctgccggatcagcgggttgagctgcgcggtggacagctggcgcgagcgccgctcggtcaggcgcaccgacaccagcgcattgttgcggcccgaggcattgcccgagttgatggtggcgtaggtgtaggccacttcggggaacgatttgagcgcggcttccacctgccgcaccttggcttcggtgacttcgatcgaggtgccgaccggcgtggtgaatcccacctgggtctcgcccaggtcggcattgggcacgaattccgtgccgatcagcggcaccagcgcaaagctgccgaagaaggttaccgcggcgatgatggcggtggccagccggtgcttcagcgcccagcccagcatgccggcgtagccgttgccaagcttgtccatctttgccgagaaccagtccagcaaccgccccaccgtgcgcccgtaccagctcttcttgttgccggtgccgtgcaggtccgggtcatgccagaccgacgacagcatcgggtccagcgtgaacgagacgaacatcgagatcagcaccgccgccaccacggtgatgccgaactggtggaagaagcgcccgatgatgccgcccatgaagcccaccggcaggaacaccgccacgatcgagaaggtggtggccagcaccgccagcccaatctcgttggtgccgtccagcgccgcgctgcggtggtccttgcccatcaggttgtggcgcacgatgttctcgcgcaccacgatggcatcgtcgatcagcaggcccacgcacagcgacagcgccatcagcgtgatcacgttgagcgtgaagccgcacatatacatcacgccgaaggtgccgatcagcgcgatcggcagcgtcaggccggtgatcaccgtgctgcgccaggagcccaggaacaggaatacgatcgccaccgtcaggaaggcgccttccagcagcgtcgagcgcacctccttgacgctgctgcggatgccgcgcgcggtgtcgttgaccacgttcagctgcaccccggccggcaccagcttgcgtgtttcctcggtcatgcgcaccaggccgtcgacggtatcgaccgtgttctgtccctgcgccttcaccaccgacaggaacagggcgcgcttgccgtccagcagcgccaggctttcctgctcttcctggccgtcgcgcacatcggcaatctcgcccagcgtgaccggctgtccggcgcggcgcgcgacgatgatctggcggaacgcgtcgggggtgggcacgcggcccttgatctgcaccaccgtttccgtggccgaggaacgcagctcgcccgcgggcagttcctggttctcgttgcggatggcgttcatgacctggtccacgccaatccccagcgcctcgagctgcgccggccggatgcggatctcgacctcgcgcttggtgccgcccacgatattgatggcgcccacgccgcgcaccgtctccagccgcttgcgcacgatctggtcggcgatggtggtcagctcgcgctggctgtgggtggcgcccggtgcgttggagaccgagagatagaagatcggcgcatcggacgggtcatagcgcagcacgcgcggctctttcacctcgtcgcggaactgcgggcggatcagcgcgatcttgtcgcgcacgtcctgcgcggcctggccgacgtcgacgctcaggtcgaacttgatgacgacgaccgaagtgccctggtacgaatgcgagaagatctcgtcgatgccggagatggtgttgacgatctcctcgaccttgcgcgtgacgtcggactccaccgactccggcgcggcgccgggatattccgtctgcaccaccaccaccgggaaggtgatgtcggggaactggtcgaccggcagccgctggtaagagaacagccccaccacgatgaaggccatcatcatcatggtggccagcaccgggttgcggatcgacaggcgcgtgaaccacatggcgcgggcccttatgccttgacgcgcttgacctggctgccgctgcgcagcgtgccgaggttgttgcggacgatctcggtgcccgcgtccagccccgagacgatctccaccatgccgctggcctcgtcgcggatgccaagctgcaccgggcgctcggccagcgtgtccttgtcgatggcatagacaaaggcgcgctcgccttcggtgcgcaccgccgaggacggcaccgccactacgccggcacgctcgcccagcaccagcgcgccgcgcgcgaacatgccggcgcgcagcgtctggtctgcattctcgatgcggatatagaccatgatgctgcgcgtgccctggctgactgccgggttgatgcgcaccagcttgccggtgaagcggccggcgccttccacgtccagcgccaccggctggccgaccgcggcgcgcgccacgtccgccatcgggatcggcgcttccagttccagcacgcgcaggtcgactacgtcgaccaggcgcgtatccggcgagaccttctcgcccggctgcaccgcgcgcgcggccaccatgccgtcgagcggggccttgaccacggtgtcggccagcgccttctgcgccaccgccaggccgccctgggccgcgtctaggttggcgtgggcgacgtccaggtcggcctggtacttgtcgaacgcggtcctggagataaagcccttgccgaccagctcgcggttgcgctcccaggtctggcgcgagttctcgaactgcccgcgcgtggccagcatctggccgcgcgcctgcgctaccctggcctcgtactcggtgggatcgatgcgcacgatcacctggccggcgcgcaccggctcgccctcacgtaccagcaccgccttgacctcgccggagaccttggccttgaccgaggcctggttcagcgcacgcaggctgcccgacagcggcagcgacacccgcaggtcctggcgcgccacgctgaccaggtcggtctgcaggaattccaccacgttgacggcggcctgggccggcgcctgcggctggcgcgcgctgacggccttgcgcacggcgaccgtggcggtcagcgcgatggcgatgcaggcggcggtgatcagcaggggcttgcgcttcatgttcaggggccgggtcgcggcgcagggggatcgggctcggcgtcggcttccatggcggcggcgcgttgcgccagcatgtcgtcgcggatgcgttcccagatgtaggggccggtctgcggcggcagcgggcgattgcgggcatcgccggtggtgagcccgaacagcagcgtgtccagcaggccgtccaggaaggcctcggggtcgatgtccttctcggcggtggcgcgcagcgcgcgctgccacagcatcaggaacaccagcggcgcacagaccagcgtcgtggtggggttggccggcatcgcgcggaattcgccgcgcgccacgccgcgggccagcaccttggcgaacaactcgtcgcccggcatcatcacttcctggttatagaaacgggcgatgtccgggaagttggccgactcggccatgatcagcttggtcagccccgccaccggcgtggcgccgatcaggccccaccagccgcgcagcagctcgcgcaacagctcgggcgtgctgccgtcgtaggcgtcgaccaggtccgacccgcgcgccagtgccggcaccaggttctcgcgcaccaccgacttgaacagctcttccttgttggcaaagtaaagatagaccgtgcccttggacacgccggccgccgcggccacgtcttccagccgggtggccgcatacccgcgctcaacgaagaggtcgagcgcggcggccaccagctcttgcgggcgggcggccttgcgccggctccagcgcggggtgtcggcgtccttgtgcgcatcggcgggcgttttcacgggtgtcttgcgggtactgcggggcacgtgggggcggctcggaaagttaataacttgtgggtcagtaatgtagatgagcgccatgagggggtcaagcgcaggccggcgaccctcgggaacacaccgggattgcactgaggcggatttacgacgtgtggcttgttgtgcgcttttcccggcgatgcccgggcgcggcttaccgcgttttccttttcttacaggacggcagcggcccttcgggcacaatgtcccctttatgctggccgcctggcggccgcccatcctgaaccatcgtcatgagctgccggtcagacctttcctgccgcgcgggctgcggcgcctgctgcatcgccccgtcgattgcctcgccgctacccggcatgcccgccggcaagccggcgggcatgccgtgcgcgcagctgctgccggatatgcgctgcgcggtattcggcagcccggaccggcctgcgttctgcggcggcctgaagccgtcggccgagatgtgcggcgattcgcgcgaagccgcgctgcactggctgacccggctggaaatcctgaccgcgccgcaggccgggcccgggcggcccggtccgctcgcatgacgcctggtacgccacctgactatcccgcaatcggaggcaatatgatccggacttcccgacggcgctggcttgccgcggcagccgcggccacgctggccgtgggcctggccgcctgcggcgccttccgcaacgaatacaccttctcgcaaagccagctgcaggcggcgctggagcgcaagtttccgttcaacaagcgctatatggagttgttcgacatccagctgaccaacccgcagctgacgctggacccggcgcgcaaccgcgtcaacgtgcagtttgacgccatgatcgacaacaagctgttcttcagccgggccctgtcagggcgttttgcgctggacagcggcctgcgctatgacgaacccacgcgctcggtggtgctgcaggaccccgaggtgcagcgcttcgacgtgcagggcatgcccgcgcagttttcgcgccagctcaacgcgctgggcggcatcctggccgagcagctgctgcaggactatccgctctataccttccgcgaagaccagctgcgggttgccggcacgaatgtggcacccggtacaatcaccgttttgccagacggcatcaacgtcaagatcaaccgcccgtgaccggggcgctcatacaacaatccaggcggtccggcgcgcatgccgggcaacgcccatgaccacgtttctccgttccgcatggaaatcgcacttgccctgaaagccgtgatactcggcatcgtcgaaggactgaccgagtttctccccatctccagcaccggccacctgatcctggccggccagctgctcgacttcaacgacgagaagggcaagatcttcgaaatcgtgatccagttcggcgcgatcctggcggtctgctgggaattccgcgcgcgcatcggcaacgtggtgcgcggcctgcgcgccgagccgctcgcgcaacgctttgccgccaacgtggtgatcgcctcggtgccggccatcgtgctggcctttatcttcggcaaatggatcaaggcccacttgttcaacccgatctcggtggcgctggcctttattgttggcggcgtggtgatcctgctggccgaatggcgcgacgcgcgccgcggcacggtctcgcatccgcagggcaatgcgctgctggaggccgccaaggccggcgcgccgcggattgaatcggtcgatgacctgaactggcgcgatgccctcaaggtcggcctggcgcaatgcttcgcgctggtgccgggcacctcgcgctcgggcgccaccatcattggcggcatgctgttcgggctgtcgcggcaggtggccaccgaattctcgttcttcctggcgatcccggtgatcttcggcgccaccgtgtacgagctgtacaaggcgcgcgcgctgctgaacggggacgacctcggcatcttcgcggtgggcttcgtctttgccttcctgtccgccttcctgtgcgtgcgctggctgctgcgtttcgtcgccacgcatgatttcaagccgtttgcctggtaccgtatcgccttcggcatcgtggtgctgttgaccgcgtactccggcctggtgtcctggcacgcctgagcgggattgcagcaggcaacaaaaaagcgtggcgggtgccacgcttttttgtttctccgtcgccagcgctcaggcggcgcgcttgcgaaagaccacgtcccacacgccatgcccgaggcgcacgccgcgccgctcgaacttggtcacgggccggtaatcgggccgctcggcaaatccgtccgcagcggtcgaggtgttctccagcaacggctcgcccgacagcacttccagcatctgatgcgcgtactcttcccagtcggtcgcgcagtggatatagccgcccggcttcagccgcgcggccagcaccttcaccagcggcggctgcaccagccggcgcttgttgtggcgcttcttgtgccaggggtccgggaagtagatatgcacgccgtccaggcagtcatcggtcagcatatgcgcgatcacctccaccgcatcgtgctggaggatccgcacattggccaggccgcgctcgtcgatcagcttgagcagcgcgcccacgccgggctcatgcacctcgcagcccaggaagttgtcttgcggccgcaggccggcgatatgcgcggtggtctcacccatgccgaagccgatctcaaggatcgacggcgccttgcggccaaatgttgcctcccagtccagtggctgcggtgcgtacggcaccatcatgcgcggcccgacttcgtcgatggcacgctgctgcccggtcgaggtccgccccgcgcggcgcacgaacgaacggatccggcgcggatgcgcaacgccttcaggatcggcaggagagggggcggacgcttgtccggcgctgtctaccggcgcggcgtcgtcagccggcgtcggttcggtgctggggtcttggggaagcatggcaacaaaaaagccgccgggcagatcaccgtaatggtggcaaaggcggcttgtctcgactggaagtggagcgggcgatgggaatcgaacccacgtctttagcttgggaagctaaggtaatagccattatacgacgcccgcgaacccgcgattctatgcggatttctggcgaggacgcaagctgccagctgcggtacgggcaaaataagtgcctgtgcgagcactaacgtccggatccgctaccacgtagaaatcgcctgcggcgtaaacaccggcatcccgatgccagccgccgcatccgtcaacggctcgatttccaccgcgggccgctccgaccttacctggccgaagatggccgcaaacggtatgtccgcggcatcccggccggtgccgatgcgaagcaggccggtggggatcgagatgcccgaaggatccagcaggtaccagcggtgcgacaggtagacctccaccaccgcgtggaaatccggcccgcccatgtctgcgtccgcgccgtagtcgaggctgctggacatgcgtgccgggatgctcagcgcgcggcacagggcgatcatcaggtgggcgaaatccctgcagacgccggtgcgttccacgattgtgtcggcagccgaggtgcgttcgttggtggaccgcgacaggaagcgcacatgattgcgcacccactcgcggatggcgtagacgcgcacatagccccgcagcatgccgccgaactcgcggctggcgaattccatcaggcggtcggattcgcagtagcggcttggtgccaggtagggcaggacatcgaagggcagctcggcaacgggcacttctgacaacctgtcgccgtcttccaggtagtgatcgatgtcgatgatcgcctcatagcggatgccgagggggccctggggtgcgcgcagcctgagcagccggttggccagcacgggatcggtgtagcgggcggtctcgaggccgggcggcagcgtcagctgctccgagacgacggactgccggggcgtgcgggcggcttcgatattgagcaggaagtccgccatgggatccatgacttcataggacaggcttactgcgtacctgaggcggttcatcgggtggtcagcactggctggggccgtggaaaggcggccggttccctggggccggaaatggcggtgcatccattgccagtgtagtgcggcagccagaccgtgacctgtcagcggcgccgcgcgcgtgccggcggtgcgccggtgtcctgccttgtcaccgcttcgagggcttcgcgcaaccggatcacggcgggcggcgcctcgatctgcgccggggtgatgaagaccagccggcccgatgcaaacggggtgcgcagccgcacttcccgcaccatcgacatggcctggtagtgggccagcgccgtggccggcgccaccgtcaggaagccgcccgcggcggtcatggccaggttgctgtggaacgaggccgattcgatatgcggaacgggcggcagctggccggcgtcgaggaatggctgctcgaacacgtcgcgcgtgtgggtgccgcgcggcggcaggatccagggaccttcatgcaggtccgccagcgcgacctcgcggcgccgcgccagcgcgtgggcgggggcgcagaccacggccaggtattcatcgcgcagcggggtgatgtggaccctggccttgagctggtcggtgtcgtctttctgcagccggcccacgatgcagtcgagttcgccttcgcagagcattgcggtcaggccgccgacgctatgttcgcgcactgccagccgcggcagcgcgtcctgggcccgcagcagcgcgaccgcctgcggcagcacgtccacgcccaccagcggcagcatgcccagccggaccagcggcacttccgggcgcgcctgcagcgcctcgccggcggcgtcgatcacgcccagcaccacgcgcagccgctccagcgcgcgttcgcccgcggcactcagccgtccgccgcgcgtggtgcgttcgatcagcctgcagccgaaggcgtactccagttcctgcagcatcttggtgacggcgggctggctgatatgcagcgcttcgccggccgcggtcagcgagccgctgcgcgccaccaggtcgagcaggcgcaggtgccggatgcgcagccggtcaatccggttgggagacggcgtggcggcgctggcgcgcgtaggggaggcgggactcataacaaaacgtgatggttccatcaagactggataattgtttcgaatggcccggcgccggacaatcggggcaaaccatggaggagacatgcgatgcatgccaacgtcgggcgccgcctgctgctgaagtccctgctggcgctgccggccgctgccgcgctgggcagggccggtgcggccagtccctatcccaaccgcccgatccggctggtggtgccctacgccgccggcggcggtccggatatccagacccgcaagctggctgagttgctggcgcgagagcttggccagccggtggtggtcgagaacaaggtcggtgcaggcggcatcctggccgcggagtttgtcgcgcagcagccggcggatggctacacgctgatgctgggtgcctcgacccatgtcacgcagaagctgctgcagcccggcgcgaagttcgacccgatggcgttcacccacatcatccgcgtcggcgtcagtccggcggtgctggtggtcagcgccggctcgccgtaccggaacgtggccgacctggtcgccgcggcgcggcgcgcgccgggcacgctgaactacgcctcgggcgggatcggctcggccgcgcatgtgtcgggcgcggcgtttgcgtcggccaccggcatcgacgtggtgcatgtgccgtacaagggctcggtcgagatcgtgccatcgctgataaagggcgacacgcagttcggcttcccggtggcggcgacggcgattccgcagatcgccagcggcaaggtgcgggccctggcggtgacctcggccagccgcgccgcggtgctgccgcaggtgcccacgctgaatgaggcgctgggccgcaaggatctcgatctcgacgcatggagcggcatctgggcgccgccgcatctgcccgcgccgatcgtggcgcggctgcatgccgcggtgctgcaggcgctgggcgatcccggcctgcgccggcgctatgccgagatgggcgcggtgcttgcgccgacgcccacgcctgaagccttctcgcggctggtggccgatgagaccacccgcatccgccaggttatcgacaagaaccgcatcaccatcgaataggctatcccatgaccctcactccacaaccggattttgccccgctggccggcatcaccgtgctggatttctcgcacgtgatcgccgggccgtttgccaccttcctgctggcgcagttgggggcgcggatcaccaaggtcgagagcgccggcggtggcgacgtgatgcgccgcgcgggcaaggggcatgccgcctttgtcgcgctcaatgcgggcaagtcgtcgctggcgctcgacctgtcggatgaggcagggcgcgaacacgcgctggaactggccggccgctgcgatgtcttcgtcgacaacctgcggccgggcgtgctcgagcgcttcgggctgggctatgaagccgtgcgcgcgcgcaatccgcgcgtggtctattgcagcatctcgggctttggccgcggcgcggcgcagtggcatggccggcctgcctacgaccacgtggtgcaggccgccaccggcatggcctggatgggcggcaccgagggcgatccgccgatgaagaccggcttcccggtgatcgactcggccaccggcatgctggccgcctttgccatcctggccggcgtgcgcgagagcgaacgcacggggcggggcatgctgctcgatgtctcgatggccaccgccggcctgcaactgatgtatccgatgacgtgcgatgccatgaccaccggcggcgtgccggcgcggcagggcaaccagggctattcgggcagcccgtcggccgatttcttccgcacgcaggatggctggctggcgatcggcgcgaatacgccgaagcagttgctggcgctgcttgacgcactcgggctgggcgggcttgcgcaagatccggccttgttcgagacgccgctggatgcgggcgccttgcctgccttcgtgcgctcgctcgatccggccgcgctcaagcgggcgattgcgggcgcagtggcggcgggcaccgcggaggatctggaattgcgcctcagcgcgctggggatcccggcggcccgcctgcgcaatatcgctgagtttgcgggggagtcgatggccaatggcagcctgcggccggtggcgctgcaggaaggggagaccgaggtgctgtcgccggggctgggcttccaggtctaccgcccggtatgacacccggcggcgtatagttgctggcacgatggcgcacggctgtgtgccgccatcgctccaactcgcaacgtcaggacgccgccaccttgaccaccgatttcttcgcccgctttgaagcggaatgcctgccgcgcatcgccgccgcgattggccagcatgaccggcgcgtgcaactccacaccctgcccgccgaagcccccggctggccgccgcgcctgcgcgtaaccggggatggcccgccggacctgcggcgccacccttatgcgctggatatcacgctggcgtgggacgggctggaggtgcaacggctgtttgcggcagggggcgagacgcgctttgccggttacctggcggcgctgccggcaaagctgcgcgcctggcaggagccgcgcgggatcgatttccgctcgctgtcgcaggctgacccggcgatcctgatcggcggactggatttcgagcgctgagccgggtgcactgactcagccagccacccgcagccggcatatcgcgctttccgtttgccccggctcgatccagcgcagcccctgaccgtggtggatcgcgtcgggcaggcctgcccacggttccacgcaatagaagtcggaggtttcgttttcggaccaggtcgtcacggcatgccatggcgcgctgccggcaaggtcgagttcgaacgtgacgcggcggtccggcatcgccagcgcggcggacgggctgtcgcgaaagacgtggaacgtgtcctgcaggcgtgcgtcgtccagccagtaagtcgtctcgccccgctctgcgggcccggggctgccatcgggtagctggcgcatgcggtccgtgcccggcaatgccagcgacgcggcgccacgttgcgcgtgcggcagcgcgaaatagaaatggtggccgggatagcagggcaggcgttgcgcgccggtattgatggtgcgcagcgtgacttcgaggccgtcgggcagcaagcggtagatggcgtcgaagacaaaggcaaaggggtagccggcccgcgttgcatcgctgtcgcgcagcgtcatcgtgatcgcggcttgcgcgtcgatggcgctgacgtcgaagggcaggtcgcgcgcaaagccgtgctgcgccagcgtgcgcatggtcccttgtccgtcgcgccactggcccggattgccatcggcaaaatgccggccgataaacggaaacagcagcgggttgccgccgcggaccttggccgggcgggaccagtcggcagcgtccggccagtagaggatgtcctgtccgcggtgcacccagcggaccagccgcccgccgtgttgcggggcgagcagcaggaacgtgtcggcatcgccgatccggaccagcggctggccctggaagtcttgtgtcggtagcaatggcatgttgatcgttggtgccgcgccgttcgcgtgccgcccggcgcagctgccatgataagcgaggccagcgcgctggcggctgccgggttagctgctggtgtagatggtgttgcgcaccagcgggtacacctgcgtctcccaccgcctgccgttgaacacgccatagtgcccgaccccggtctgcacatgatgcatgcgcatgtaggggcgcaggctggagcacaggtcctgcgccgccacggtctggccgatggcgcagatatcgtcgcgttcaccctccacggtgagcagggcggtgcggtggatggcgcgcgtgcggacacggcgtccgctcacgtcaagcaggccctgggccagcaggaagcgctggaataccaggctgacggtttccaggtagaactccgcggtcaggtccatggtggcgaagtactcgatgtagaagtcgcggatggcatcggccttgtcgtgctcgccgcgctcgcgcagggcgtagagctcgcgcagcgcctgttcgtgccgctccgggttcatgctcatgaaggccagcagctgcacgtggcccgggtagacgcgccgcatcgcgccggcaaagcgcagcggcaccatgccgatcaaggtgcgctcgaaccattcgaggggttggctcatggccagcgcgttgaccttggtcggattgacgcgcgcgtcgatggggccggccatcagcgtcaggctgggcggctgggcgggatccccgtcctcggccatgagtgccgctgccgccagcgctgccacggcaggctggcaaatcgccaccagatgcgtgcctccgcccagcgtctgcaggaagccgatcaggtgctgcacgaattcatcgaagccgaagcgcccggccagcaacggaatgtcgcgggggttgtgccagtcggtgagatagacgtcgtggtcggccagcatggtctggaccgtgccgcgcagcagcgtggcgaagtggccggacatcggcgccaccagcagcacgcgcggctggccgacgatgccgtggcggcggaagtgcagcagcgagcagaacggcgtgcgcgcgacgacttcctcggtgaccggcaccggctggccgccgacggttgcgtggtcgatgccgaaggccggccggtggtgcgtgagccgcaccagtgcgatgagctcgcaggcggcacgcaggcggggcaccgcgtcgaaaccaccggacctgggatttgccgccagcgtcgcggcagccagctccgccagcgtgcaggccggcagtatcatgtccgcgtagatctggtaggcgtggtacagcatggctcggtccccgctattctggttcttgcgagccgcaatatgcatgccatcagtttatgcctggcacgcgccttgcgcattgtgctgtgagcgggcggacaatgccgcgcaagtagcgaggcatgcgcctggcgcatgggcatggcgccgcttcgcggcgcgttgcgcgcagcggcttcagactggtgcctgccggatgcactgcataggtgcgcggccattagcggcaacaagcagtaaaggaggcgcgatgtccaagaccacactcaccattagcagcaagacctattcctcatggtcgctgcgcggctggctgctggcgcgctttgccggcctggaattcgaagaagtgctggtgccgccggacgacgccgcggcgcgtgcggaaatcctgctgctgtccccgtcgatcctggtgccgtgcctgcgccaccacggcgtgacggtgtgggacacgctggcaatcgccgaatacctgaatgaaatccaccccaaggctggcctgctgccggaagaccgcgccgcgcgtgcccactgccgtgccatctgcggcgagatgcattccgggttcgccgcgatgcgttcggcgctgccgatgaacctgaaggggcatttccccgggatgaaggtgtggtcgcgtgcgcaggcggacatcgatcgcgtcacggcgatctggaccgaatgcctgacgcgctacggcgggccatacctgttcggcacgcgcaccatggccgacgccatgtacgcgccggtggtgacgcgctttgtcacctatggcgtgatgctcgatcccgtgccggttgcctactgcaagcagatcctgtcgatgccggaactgcaggagtggatcgcggcggcgcgcgaggaacccgacgaaatcagcgagctggatgtggagttctagcggccgccgccggcgctgacgctacgccgtggccgattcggcttgccgcgcagccaggaagcgtgcggcgtagtcgaagtaccagtcgagcgtgtccgggttggccatcgcatcgcggttggcgatgccctgcggcgcatggccgagcagcagcttcttgatcggcacctccatcttcttgcccgacagcgtgcgcggcacgccgggcacctgcacgatctcgttgggcacgtggcgcgaggacagcgcgtcgcggatgcgcgcgcgcagggtgtcgcgcagcgcatcatccagcaccaggccttcgcgcagcactacgaacagcggcatataggattcgcggcccaggtattccaggtcgaccaccatgctgtcgagcacctccggcaggtcttccaccacgcggtacagctcgctggtgcccatgcggatgccgtggcggttgatggtggcgtccgagcgcccgtagatcacagcgccgccgcgccttgtgatcttgatccagtcgccatgccgccagacgccgggataggtgtcgaaatagctgtcgcgatagcgcttgccgtcggtgtcgccccacaggtagagcggcatcgacggcatcggctcggtgcagaccagttcgcccaccgcgtcgagcagcggctggccgtggtcgtcgaaggcctccaccctggcgcccaggcagcggcactgcatctcgccggaatagaccggcagcagcgggcagccggcgacgaacgagccggcaaagtcggtgccgcccgacatcggcaccagccagatgtcttcgcgcacatggcggtagatccagtcgtaggcctcgaccggcagcggcgagccggtcgagccgagcccgcgcaggcgcgacacgtcggcgatgcgcgccggctcgatgcccgccttcatgcagttggtgaagaaggccgcgccggcgccgaacatggtcacgccggcatcgtcgacgaagcgccacagcacgccggcatccggataagccgggttgccgtcatacagtgcgatggtggtgcccagcagcagcccggccacctgcgcgttccacatgatccagccgctgctgctgtaccagtggaagacatcgtccgggcccaggttgttatggaaggccatcagcttgagctgctcgatgacgatgccgccatggccatgcacgatcggcttgggcatgccggtggtgccggacgaatagacgatccacagcgggtggtcgaacggcaccggctcgatcgccagcggcacgtcgtgcgccagcacctcctgccaggcatgggtgcgcacgccggcgggcggcgccgcattgctgccgacctgtggcacgagcacgagatcggtcagcgaggacagggtggcgaccaggtctgccaccaccggggcgcggtcgtagaccttgccgccatagcggtagccatcgactgctatcagcaccttgggctcgatctggcggaagcggtcgatcactgccacctggcccatgtcgggcgcgcagcccgaccacaccgcgccgaggctggcggtggcgaggaaggcgacgatggtggcggggatattgggcaggtagccggcgacacggtcgccgcgctgcacacccatctggcgcagcgcatgcgccagcgacgcgacctgggcttcgagggtgtcccagctcacttcggccagcagctgcgcttcgccggcgtaacggatcgcggcgcgctggcgggcggtgccggtgctggtgccggcatggcggaatacctgctgcacgtagttcagcgtcgcgccttcgaaccagcgcgcgcccggcatggtgtggcggtccagcacctgcgtggcgggcgtgtcgaaatgcacgtcgaaatacgcgcgcacggcatcccagaaggcttccagctcggtgaccgaccactgccacaggctgtcgtagtcgtcaaaggccaggctgcgctcggcgcgcagccagcgcatgaaggcggcgatctggctgctgtcgcggaacgccgcggacggcgtccacatcagattcccttcggtcagaggggcgggggtgctcatgtctcctcctcgggcccgtctgtcgcgggcatcggatggtggcgatgggtatgccgggctcgtgtggcggcagccggcatcagcctgcaatgataacggcccttagattcagttgccggccggacgctcgaacaggctttcccacatggtgtcgaccttcgccttgaccgcggcatccatggagatcggcgtgccccattcgcgcgtggtctcgcccggccacttgtcggtcgcgtcgatgcccatcttggagcccaggcccgacaccggcgaggcgaagtccaggtaatcgatcggcgtgttgtcgaccagcaccgtgtcgcggctggggtcgacccgtgtggtgatggcccagatcacttccttccagtcgcgcacgtcgacatcgtcatcgaccaccacgatgaacttcgtatacatgaactgccgcaggaagctccacacgccgaacatcacgcgcttggcatggccggcgtactgcttcttcatgcgcaccagcgccatgcggtagctgcagccctcgggcggcaggtagaagtcggtgatctccgggaactgcttctgcagcagcggcacgaacacctcgttcagcgccacgcccagcaccgccggctcatcgggcggcttgccggtgtaggtggagtggtagatcgggtcgcgccgcatggtgatgcggtcgatggtgaacaccgggaaccagtcctgctcgttgtaatagccggtgtggtcgccgaacgggccttccagcgcatgctggtagccggacgggtggttcgggtcgggctggatatggccttcgagcacgatctcggccgacgcgggcacgctcagctcggacagcgtcggcgtgaggcagccggccagcgcggtgcggctgccgcgcagcaggccggcgaactggtactcggacagcgtatcgggcaccggcgtcaccgcgcccaggatggtggcggggtccgcgcccagcgccaccgcgatcgggaagggcttgccgggattggccagcgcatgctcgcggaaatccagcgcgccgccgcggtgcgccagccagcgcatgatgacctggttgcggccgatcacctgctggcggtagatgccaaggttctggcgcttcttgtgcgggcccttggtcaccaccaggccccaggtgatcagcggcgcggcgtcgccgggccagcaggtctggatcggcaggcgcgccaggtcgacgtcgttgccttcccacaccacctcctggcaggccgggctgctgacgcgctttggtgccatatcccacacagatttggccagcgtgaacagcttgccggcctcgcgcaggccgcgcggcggttccggttccttcaatgctgacaagacccggccgatgtcgcgcaggtcctccatcgattcggcgcccatgccaagtgcgactctgtgtgtcgtgccgaacagattggccagtacggggacgctatagatacctccatcggtgctggctccggaaggtttctcaaaaaggaccgcggggcctccagcgcgcagcagccggtcgcagacttcggtcatttccaggttgggcgcaaccggccgggcgatgcgccgcagctcgcccatgccttcgagttggccgatgaaatcgcgcaagtctttgtattgcatagtgaattctgttgtggtgcggggctgggggaaagcctctgcaaggcggcgtcgaagtcggtgacgatacacattcaccggcgccgcggcaaaaaaatcatcaaagccaagccgcgcaaattgtaagttttttgtcgctgacagcgtacttttccgagcgaccagccaaggccaggcctgcgtttgcgggcaatcgggtgatccggtggcgacatggcaatcattgttacaaataactgtaagtagtagaaaccgaagttattattcttgacgggatataacaccgttcctacaatccggtcttgctcctggagtgttgcgtcgcaacatggattttccccctgtgtcaaggggtgcacataaagaaaatgtgccagaaagtccctccagcaaggaccgatgtatggacccgaagcaaggcgggccgaccggtcgcctccggcgacttgccggagcgtagtgagtttagtcgtggcagggtgcgctcccccagagcgtagcctgtttccagttgggcgcacggggagcgcctgccaacagatgcttggtcgtcactgctggacggcgcggcatccttacttgagtacgttgagatcgggcgcgtgccgcagtcgggcgcgcgaagcgggcaacggatggaggtaagcatgagcggttggaaaacccttcatcttcccggcatcgggcgggccttgcaggtccgtctccgacagccggtacccggagtgagtcgggcattgcaggtccgtcttgcgcatccggtcgcgggccgcgcgttgcgcggtggccgcacaacgctgaagtacgcgctgaacagcctgggcgtggtcgcggtcgtttcggccgtgtcgctgtcgctgagccaggaatggcgcaccacgctggccgcgctgctggcgggtgacgaggcacccgcggtgctggttggcgccgccatgccggccgcgcctgccgtggccagcactgccgtgccgccgcattcggcggacgtcgccgcggccaagcttgcctttggcaaggccggcctgccgacggtgtcgggcgtggacgaatggaccctggcggcatccgccaaggtgccgtcggtcgcgcacctcgccgcgcggatcccggtcacgcgcgtggcgcaagacgcccgcagcaccgccacgctgggcagcgcgcgcgagcaggcggccgtcgccgactatatcgcccgcaagtaccgcgtggcggcgcaggccaccgcgcagctggtgaaggcggcctacctgaccggccgcgaggtcggcatcgacccgctgctgatcctgggcgtgatcgcgatcgagtccagcttcaacccgtacgccgaaagcggcgtgggcgcgcagggcctgatgcaggtcatgaccaaggtccaccaggacaagtacgaggccgtcggcggcgttgccgcggcactgaacccgtatgccaatatcaagatcggcgcgctggtgctcaaggactgcatcgcccgcgccggctcgatcgaaggcggcctgaagtactacgtcggtgccaccacggctaccgatggcggctacggcgccaaggtgctggccgagcgtgcccgcctgcgccagctgctgggcgtgcgcaacgcgcccgccaacgccgacaagccggtcgaggtcaaggccccggccgagcagctggccccgaccgagaaactggaagcgaacaacggtccgcacaacgcctgagcgcgcaacggtaccgccaatcagaaaagcaccccgcggggtgcttttcttttgcctgcttcagccgcggcagaggacggtcagcggaacagcttgccgaggcgcgccatcgcctcctcgatattctcgcgcgaggtcgcgtacgagatccggatgtagtccttcgccgtatgcgggccgaaatcctgccccggcaccatgaccacgcccgcatcgtgcagcatcgcctgcgtcagccggtcggcatcgccggcggcggggtggttgacgccgcggcagtcggcgtagacatagaaggcgccgtcggggcgcaccggcacgcgcaggccaagggactccagtgccggcacgatcaggtcgcggcggcggcggaactcggccttgcgttcgtcgtagatcgccagggcctcgggggtgaagcaggccagcgcggcgtactgcgccacggccgacgcgcagatgaacaggttctgcgcgaccttctcgaaggcttccaccagcgcctccggcaccaccagccagcccaggcgccagcccgtcatgttgaagtacttggagaagctgttcaccgtgaccacgttctcgtccaggctcagtgccgagaccggcggcgcgtcataggacaggccctggtagatctcgtcgaggatggcaaagccgttgcgcgcgcgcacggcctgcaggatgcgggcgagctcgtcgggcaggatcgaggtgccggtggggttggaaggcgatgccagcagcacgccgcgggtctgctcgccccagttggcctcgacctgcgcggcggtcagctggaagcgctcggccgggccgctcgggatcatgcgcgcggcgccgtcgaaggcggcgacgaagtgccggttgcaggggtagctggggtcgggcatcagcacctcggcgccgatctcgaccagcaccgcgcacgccagcagcagcgcgcccgaggcgccggccgtgacgatcacgcgccgggccgggatatccagcccgtaggccgtcttgtaatagcccgcgatggcctcgcgcagcggatggatgccgagcgcaccggtgtactgggtcacgccgcggcgcatggcggcttcggccgcgcgcaccaccggctcggcggcggtaaagtccggctcgccgatacccatgtgcacgatatggcggccggcgcgttccagcgcggcggcctgcttggccagttccatcacgtggaaggcttcgatattggcgaggcgggaggcggtggccaggtgctgcatgtccatggtggtccgggacgggcccggggcccgttcagcaagaggataggtaggaatgaaaacacccgccggggcgggtgtcgtcttcatcactgccggcgcaagccagccgtgatggcgtgggccggcccgcgggcggctcagctggcaactcagcggcgcgccgcgacctcggccgcgcgcacctgggcggcaagcttgtccagtacgccgttgacgtacttgtagccctcgacgccgccaaaggtcttggtcagctcgacggcttcgttgatcacgaccttgtacgggatgtcgaggcagtgcaccagctcatagctgccgaccagcagggcggcgcgctcgaccggcgacagttcttcgaccttgcggtccaggaacggctcgaaggcggcggtcaggcgggcttcctcgcgtacggcgccgttgaggagcgcgtcgaagtgctcgcggtcggccttgttgaaaccttgcgcatcatgcaggtgagcctggatcgccccgatgtcattacggttcagcagccactgatacagcccttgcagagccagctcgcgcgagcggcggcgcgcgctcttgggcggtgccttggcctcggtgcgggccgcggcgggcttgccgccggctgtcttgccgccgtcgttgtcgggggtgttcgacgtatcactcatcgtcgtcctcgtcttcatcttcctggccgcgcagcgaatcgagcgcggcgaccaggttggccatctccaccgcggcgcgggcgcagtcgcggcccttctcgcgcgtgcgggcgtgggcctgctcgtcagtatccacggtcaggatgccattggcgatcggcacattgaagtccaggccgacgcgggtgatgccggcgcccgactcgttcgagaccagctcgaagtggtaggtctcgccgcgcaccacggcgcccagggcgaccagggcgtcgaactggccgctctcgcacatcttctgcagcgccagcgggatttccagcgcgccggggacggtcaccaccagggtgtcttcgccctcgacgccgagcttttccagctcggccacgcaggcttcgagcagttcggcgcagaccggctcgttgaagcgggcctgcacgatgccgatacgcaggccttcaccgtcgaggttgctggggtagaagccgtgatccattgttcagttctccagttttcggggcggcaacggcgctggtgcgcgctgccggggtgtccgggtggcgcaggctcagtcggcctggccgttcatgggttggtagccggtgacctcgaggtcgaagccggtcatgctgggcatgcgctgcggcgacgccagcacgcgcatcctgcccacgccaacatccttcaggatctgcgcgcccatgccgtaggtgcgcaggtccggcttgcggcgcgggcgcgactgcggcgcgtccagcgcgctgaactgcgtgaacagctggtcggccgagtcgccgcagttaagcagcacgatcacgccgctgtcggcctcggcgatggctttcattgccgccggaatgctccaggaatgcgtggtgcacttcacttccagcaggtccagcaccgagaagggctcgtgcacgcgcaccagcgtttcctggtccggcgcgggcgaacccttgaccagcgccaggtgcgcctggccggtgggcttgtcgcggtaggcgatgctgtggaaggtgccgtagggcgtctgcatggcgcgctcgcccacacgctcgataatgctctcggtgcggctgcggtagtggatcaggtcggcaatggtgccgatcttcaggtcatgttcctgcgcgaactcgatcaggtccggcaggcgcgccatggtgccgtcgtccttcatgatctcgcagatcacggccgccggcgtcaggcctgccagcgcgcccaggtcgcagccggcctcggtatggccggcgcggatcagcacgccgccgggctgggccgtcagcgggaagatatggccgggctggaccaggtcggccggcctggcgtcgcgggcgacggcggcctgcacggtgcgggcgcggtcggcggcggaaatgccggtggtcacgccctcggcagcctcgatcgacacggtgaagttggtgccgtgctgggtgccgttgcggctgaccatcgggtgcaggtccagctggcggcagcgctcggcggtcagggtcaggcagatcagcccgcggccgtgcttggccatgaagttgatcgcttccggtgtgacgaaatcggcagccagcaccagatcgccttcattctcgcggtcttcctcatcgacgaggatgaccatgcggccggcgcggatgtcggcaatgatgtcttcggtacgggcgattttcatggcgtgctgaacggcaaattggggcgaatcgagcgaaaaaccggcgaatagctggggcaggaaacatggccgcggttgaaagcggccggactgaggcggggcgtcgggccgggccggccaggccatatacgcccggcaggttgcccagtcaagccgggtattgtacgccaaggcaggcaaggcgtgaggcgacggcgccggaaagtgcggcgcctgcctgaagcgggtggggagcgcggtgctgcatgggccgccccgttgccggcagggtgccggcgcctggctcggccggggctatgcggcggcggccagcgcggtgcggtcgtggcctgcggcgcgcagccgcgaggtcctggcgatgcgcgccctggccgcgcgggtcgcgtcagccagcgcgagctcgcgcgtgaggaagccggcgttgggtttggtgaacctggcatgcgcatccagcgcataggtccattcccacttgccgaaggtgacctcggccagtgtcacgacaacgtggcaatgctgatagaaaaaactctcgctcatgcttgtttcctgtgtgggacagcgcgctggccatggcctgcaagccatgcgggccagtggcggtctgtcagccagccgcgcaggggcagccggccatcccgtgggtcgatggcggcggcgccggcatcctgggcgatctcgcagagccgcccctttgcgtgcgggtcgcacgcgcagatcatcatcagctggcctgcggtcatttgccgcttctgccgcctcaggccggcgcgcatgatcccggcgccgatcacgctgcccagccaccggccgatcacggcgcccagcgccatgccgccgaggtaggccatgaagcccgtggccgcgttgaccggcgtgccgtagcggaacacgagccaggccaccagcactgcgccggcggccatgccggctgccgcgacttcattgcgataggtgacctgtgccgcgtggggcgagggcaggccttcggccggctggtcgtcgcgctggaagaaccatggcccgtcgatgcgtgcgggagtcgcggccagctcgccaagctgcgcgtgcgcgcgccttgccgcggcaatgtcgttcagccggaaatacaacagggtgagcatggtcatgcctcgcttggtgtcaggtccatttgccgctggaccacggaaagcctgcgaaacgccgggcgcctgggcgccggaatgtcttcgccaggggggaggacggcggctgcagccgcggccatccgttgcccacggcctggtcccagtcgatcagcagcgtggcggcacggtgcaggtgggtcgcggccaggcgcacaaagcccaggcgcgcgcgcatcggcgcagtgggatgccggtcacgcagcaggcgcgtggccggaagtcgctgatacaggattctggcggtggggtcgggcacagtgagttccttcatgggcgccgggcaacaatccggccggcagttgaaagaaacggcgggagcgccagctcgcggacgagcgcgcggcgcggcgggcaggggagcatgaaggtccaggtggtccccgtgagtgacttcagcagtcaccggtgctagacgttgtcgaggggggaggcccgggaacgagtggcgagcgcctgtgggcatacatggactgcaagcgctgcttaaccattctaggcctcgggcgctgcaggcaccagctgacttacaacaaagctgccaggccccgcgcggcgcgcctcccagggggccggcggtacaagcaaattgccacaggaggggtttgtcagcgtatgctcgggacaaaagggcacgccccgccctgaatgccgccgcgctggcaagcggcggttcggacttcaaatcagggcggcagcccgatcgcgcccgcggactttgtacaacaaagggagacaaccatgtcgaggcagatcaagaacaaggctgaactgcgtgccctggtacgcgccgagcagtcgaagttcgccgcctgcgaaggcgcatgctttggcgatgtggtctggcacgcgccggacgccggcggctgcaactggagcctgtccacgatggagggcggcaacagcagcgcatgcgtggaagcgctgcgtcccttcaccgacaagctgcgcgagacctataacgtgcctgacgagggcaggtagcccgcgggattacgcgggggcctgcgcggtcgacagcatccgctccacatagcgggcgatcaggtcgatctccaggttcacgcgcgcgcccggcttgagttcctgcagcgtggtgacttccacggtgtgggggatcaggttgatggagaacacgcagccgtcggcttcgtcattgacgcggttgacggtcagcgacaccccgttgaccacgaccgagcccttgtaggccaggtagcgtgccagctcgcgcggagcgcggatgcgcagttcatgcgattcgcccaccggcgcgaagtgcacgacttcgcccaggccgtcgacgtgcccggacaccaggtggccgcccaggcggtcggccaggcgcagtgccttttccaggttgacgcggccggtgctctccagccccacggtcttgtccagcgactcgcgcgagacctcgacgtcgaaactgtcgggcgccatggcgatcacggtcatgcaggcgccctggatggcaatgctgtcgccgatgatgacgtccgacaggtccagcccgcccgcggcgatatgcaagcgcacgccggcatcggcggcgcccagcggggttacggaatcaatgcggccgactgccgcgacaatgcctgtaaacatggtggtgtcttctgctttgggtatttggaatctggatacgcggtgccgatgggtggcgcgctacgcgtcgttgcgccgggcaatcaggcgcaggtcgtcgccgatctgccggatctcatgccagcggaactgtgcggcgtcctgcagccgcgccagcggcggcaggttgaacatgccctgggcatcgcccagcagcttgggtgcgaggtagatcagcagttcgtcggcgcaatgctcgcgcaccagcgaaccgttgagcttgaagccggcttccacgtgcagctcattgatgccgcgccggccgagttcttccagcattcggcgcaactcgaccttgccgtgcgggttggacaggaccacgacttcggcgccgcggccttccagtgcgcgctggcgttcgcggtcctccaccgcgcagaacaccagcaccggcttggcgaactggccggtgtccggcgtcaggatctgcgcgtccagcgggacctccagccgcgaatcgaccagcacccgctggggctggcgcggcgtggcgatggcccgcaccgtcagcgcggggttgtcgtcgcgcacggtgccgatgccggtgaggatcgcgcacgcacgtgcgcgccaggcatggccgtcgtcgcgcgcggcctggccggtgatccactggctggtgccgtcatgcagcgcggtgccaccatccatcgatgccgccaccttgatgcgcacccacggcagcccgcgcgtcatgcgcgagacgaagccgatattcaggtcgcgcgcttccttctccagcaggccgcagcgcacgtccacgccggcctcgcgcaaccgctgcaggccgcgcccggataccgacgggttgggatcctccatggccgctaccacgcgcgctacgcccgcgcgcaccagcgcatcggcgcacggcggcgtgcgtccgaaatggctgcacggctccagcgtgacataggcggtggagccggccgggtccagcccgcgcgccagcgcgtccttcatcgcctggatctcggcatggtcctgtccggccggctgggtaaacccctggccgatgacctggccatccttgacgagcacgcagccgacgcgcgggttgggcgtggtgatgaacatgccccgcgcggcgagcgcgagggcctgttgcatggcggcgtggtcggtatcggaaaacattcggcggttgcgtttgccttggcgcagcgatctggaatacagggctgccgggttatggtggtccggaggactccgtcgcatcgcagtcagcgtcgcggccgggggtgcagagtcggatacgtccctgcgcgcccagtctgacttgccgctgctcgccacggcagccgagcgtgaaagtggcggcctggaaaccgccctgctcagaacgagagtatcccacaggcaggaatttcagcacattcgtgccgcgggcggtctggcgcagcgtcacccacaggcagggcatgcccggttcgaccacggccagcaccgcgcggcgatccgggtcgccgtctgccgcgaccagttgccagccagggcccagcgtcgcctcgcccggcagcggctgcagcgtcacctcgaggcggcgcgccagtgcggtggcccgcgccagcgccagcgatgccgccagccggtcggccgccagtgtgacctgttgccgggcgagcaggccgccgaacaccggataggatgccgccgccagcagtgccaggatggccaggccggcgagcagctcggccagagtcaggccatggtggcggcggggagcgtggctgttcatcgcgccttcagcaatgggacggaagcggccgcggcacggcttcaccttcgggtagcgtcagccactgtccggtgctgcgcaggatcagcacgccgcactccgggtcgggccgctgcgggacggctcgcaattcaacacaggtatccaggccggcctgcgggcatgccgcggctgtcacgacatgacgcacggtgccggtggccggtacgggtagtggccattccccggcggccacttcggcaccgggttcggtggcaaacgtcatggcgccgacggcgtggcgctccagttgcagcattccctcggtcagcgcggtacgcgcctgcgcccgccatccccgcatcaggtggccgtgccatgcgggcacggcgatggccgcgaggatcgcgaggacggccagcgcaaccgcaagctcgaccaggctgaacccggcccggggccgggaggcaggcgccgcggtagtcatggcaaatcctcccgtaccggtccggcgatctcgcgccagcgcaggcgcccggtgcgccggctggccatggtttgcgacacccgcgtgaccgtgttgccatcgacagcccatagcgacagctcgtaagcctggcgcgcggtgcgtcccggctgcgccggtgcggcgggcaattcggcaacggtcacgaacacgctggcgcctggagccagcaactggccggtggccatgtgcaggcgttcgccggttccgctctggctgaccgattccccggtcgccgccagcaccaggtagctgcgttgcgcgccatcgggcgtgcgcgtcacgaacagcagatggccggggaagaccggctggacctccaccacctgttcgccggcatggggcagggtcagatgccagccggcatcgccggcgccggctggctgcgcgcgcaggatgtgcccgccatctacggcctgcgccacaacttgcaccaatgggactgcagtggcgccgcgcgaggacgacaggtcgggcaccgctgcaagttcgttgcccgtgccatagaccacgaccggcgcagtcggcgctccgagcagcacgggcgcttcgggcatgagcggctgcgccgacgtctgcatccggtggaggcatgacacggcgggcgcaccgcccggctgaggcgcttccgcgagcgggaagcgccatagctggccggcatcgtctgtcgcataggcagcgcgtgccgtgcctgtcatgtcggacagcacgctggccgccaccaggttgccggttgccggccggcccaggcagtcgcgttccggcaatggcaaggtgcggacggcgtactgcccggcccatgccgccccggcgggcttgtccaatggcagcagcgcaaggccggagcgcgctgcctccgacttgtcatgggtcgcggcagccagcgtcacgactgcgtaccagcgcaatccgtcctggccaggaatgccggcggcacgcaccgggccgcgtgcggatagtggcaatgtgtccgtggcggcgatctcccacagcaatgcaaagggcatcggaccgtcgggatccgagacgtcgagcgcgaatgccgctgcggggttgccggtcctggcgctgccagggatgccacacagcacgaccgtgcgccactcgccatggatcgtcacatcctgcgcttcggggcgagggcagggcgcgggcgccagcggcgcgtcgttcgccggcgtggcggcggcatagggcaacagcacgccgggcagataggcggcgcgttcctcgccggtcacggcattgaacgcatgcagcagaccgtcgttggtgcccagccagacgacgtgcgggcgcaggctgtagcgcgcgcgaaagccggcatgcccgggtttgccaggcgcccaggccggaggcgcaaccacccgcacgcgcgcgcctgcggcattgccgagtcgcgtgtcgcgctggcgcaggccggcctcggtgcggtcgccgcgcagccattcgaggtgagcgcggtcaaggcggcccagcatgtccgcgctatccgtattccggaaggcggcatcgatggcagcccattgcagcgcgatgacgcgctgcggcggcgctgacgacgtgaatatgcgacgcgatccaaccggccgatggtcgaggctcgtgccggcttcccatagataaggcgacagcactggcgccggtccttgccagccgacagcgaacaagcgcccggtccacggatacgcgcccgccgtggtccggtaagccagcggcaatcggcctgcttcggatccggtggcggcagacgctggtgcaatggcgatggccaggcaggcgaaggcaacggcaacgaggcgattcacggctggatcacgctctgtagcacggcacgtacggcacggctgcggccgaagccgatggccgtgatccggatccgtggtgccggtgtggtggcggaaggggcatccggagtgctgtagccggacggtgcttcgtccaggatctcggcgacataccgcggcagttcgcgcgtgccggcggcacccgcgggcagcaccggcagcgtcgcacccgagaagcggccgaatggcacgccgacggcgtccgcgctggtgtcggccagcagccagggctgccacacgggtgggcccgtcaccgctggccggcacacgccagcctgctggccgctgccgcagtgtcccggtgccggccagatgccgagccgccccatcatgtcttgcgatatggcggccgcaagcaggtccgactcggcatcaagcaacgcgacctcggcggcccggaatgcgatttcgcgttcgagctgcatgacggcaagttgccgcgcggacagcagcatgtgcagcgtgccggtagcggtcagcactaccagcagcagcatcgtggcgcagagcagcagcgtgacggcgcctgcattgtggcgacatggaaggcggcgggctagcacagcgtttcctggcagcgtggcgcattgcgcagccgcaccgtggtggcgaagacgcggcgggcggtgccggcctgcgacggcggcaccggcgccagatcgccggcggcggtgccgggtgggtcggcgtctttgcccgggcttgccgctgccgaacccgggcgctcgccgcgcacggcaatggcaatctgcacggccaccacgcgatgccaggcggattcatccagcgagtggatcgcggatgccgtctcgaagcggtcggcccggccgtcgccgtccgtatccaggccgtagcgcacttgcagtgattcaacgccgcggaccagcgcgccggaggtccagccagtgccgtcgatcacgccaccgcggcgtgccgggtagcggcacagcagttgcggcacgccatcgctgcccgccgcgacatagatcaggttggctgcgacgtagccactgtgcgcgtcagcaccggccacgcgcgcggcgacggcgtagccgctgcagtcggtcatggcttcatccggctgcgacggcgcagccggcaggccgctgccgctgaagcggaccagcagcgcatcgctgcggccgacgccagccctgccgcaggacggcaccgcaccgatggcaggctgaccgcagtcgtcggcgccgctgacggccggcggcgcagggtaggaggtggcgggaaggggctcgcccggccagccggactggcgcagcagcgcggcgatgatcgtcagggcgcgctggccgcgctcttcgagcaggatgcggtcggtggcggtgaggtaggcggtacgagtggcatggaatgccgcaacggctgccgcggtgacgatcaggccgagtatcagtccgaccagcagctcgaccagcgagaatgccctggatgcgtcccgcctcatgggtgcatccacaaggcgatcgcgggtatgccggcctgcccgccaagccgtccggccatgatcagtggcgaatcttccgggcacggaaacgccgggttgctcccgcaccggctcgaccagaggtctggtcgcccgctttgcagtgccggctgcgctgtatccagctcagccatctccacggcaaggcgggcggaccgggccagcgcgtcgagttcgcgcagctgggccagcgccttcggcgccagccccatcattggcatcagcccggcaccaaggacgatcagcgcgcacagcgtttcatgcagcgcgaatcccgcggggcggccggcgcaacgcggtctgcggcgcgggcgggcaggtggatgtgctggcttgcgaagatccggcatgggcggtcaccgagactggcagggaccgtcagactagctgtcgcgagcaggcgaatacgtgcctaagcgtggaggatttgcagaatgttgtttcggtcttcccgggaacagcgaccaggcagcctcgcctactgacacaccgtggcttgtgtcggcacgggcgcgcatacgcggaccctgcccaactggctgatatcgatgagcttctggttgccggtgcccagtcccatcagcacctgggcagactgcatcgcatctgccagcgtgcgggtatagcctacgggcgagtaggagaggacccccgactgcggcgtgctggagaatgctacggtcaatccctgggcggaggggacatgctgaaccagcacggcttggcccgtgcagtccgcgtttcgatttgggttcaggcagacagtccagccgttgcgccagtcattgctgacgggcgccacggtgacccagctattgcgcgatagcgcactggcccgtgccagggaaagcgacgaagccagcgcgtctgcttcagtggcaagcgtgttgcgctgaatgaaggaggtgtaggcgggtgccgccatgccggcgaggatgaccagcacgaccagcgtgaccagcagttcgatcagcgtgaatccggtctggggtcggggggcttgagggcgcatcaccagcatccctggggcaggttcgcgaaggcggcgacatggttgatcagcacgccgcgctcgccggtgctgcgcagcagcagcgtgccacagcggttgtcggcgatcgtgggcgtggcgctgacctgcacgcattcgttgaatgccagccctgcgcacgcgccggatgcaatcgcgtagttgccgctttccgaggcttgcgggaagccgcgccaggcgcgcgtgctgtcggcggggtcgacgtaggagttggcctgtgcgtaacgacgctccagcgcttgcatggccgtcatcaatgcagccttggcttcggtgcggcgcccgcgggcaacatgttcggcgtagttgggatacgcaatgccggcgaggatgccaaggatggcgatggcaatcagcatctccatcagcgtgaagccgctggcgtggcgacgccagtcacggtggcagcgcttcattttgcggctccgaaattgcgaatctcgcgccagccaaggcgcccggtggtggggtgccccccgtcggtggctgtgttgccggacacaagcggcctgctggacaacgacgcgcctgcgctgcggccgccacccgatgcgccgaacgagaacacgtcgatgaacttcagcgtagtgatctggccgacggcattgcgttgtggatcgaccgtggtcttggtctggatcagcactggcgcacccaggatgccgaaggtggagagatcgccggtcgatgtccccgtggcgggcatgccggtcagcgcattgatctgatagcggccgctgttgctggaggcgccgcaaagatcttcgccggtcatcagcgagttgaaccagatctttccgtaggctggcacgagtgcggtgacctggcgttctccgttgcccgggaaatcaaagtaccaccccgccttctgcccagtctttgagccgaggctatagctgcgtgacgaatattcgtaagcgcccttgctgttacgggtcagggtgaccgggttcagcatgctgcggtctgcgatcgactgggagcctcccgcatcgtagatgccgtacatggcgttccgggtcagcgtgccggtggtgatggtgtcggcaggctccaggtacttcccggtgccgaacaccaccatgtagccgccgggcgcgtagacccatttgggctggaccgtgatcggttgcggctttccgctggcatcgcgggcctggaacagcggccggccgtagttgccgccgccgtagtagggcagggccccggcagcgttccaggtggatgggccgccattcaggatgaacttccagaggcggccctggaggtcgccggcgtaggcggcgacggtctgcccgtcggtaagccgcaccagcgccggcgagctcagcccgttggcaatgccggcggtgacgtccgccgccatcgagatcttccagtaattgacgcccagttgccacggcgtcccggccggcttgtccagtgccacgatgaacagcaccgaaggcgcggccggattgctcgcgccatccgcatcgttggcattcaggccgttgcccgtcatggcaaaccacctgtacacaggcttgttgtcggagtccttgccggcaaacagcttgacgatctggggcggcgacatgacgttgcccatgtcggcatcatccttgtccgtgaactcccacaagacattgccggatccgacgctggcgggatcgctgacattcagcgcaaagaggccttgcgcgccgccacccatgccagagaccagcacggtctgccaggcgttgccgacccgggcttccgccacggcaggcgtggcgtccacgtacggccgatggatatagctcggcgaggtcagctggaccaggttggcgaacactgcgtttggcacgtaggcaaacagttcagagccattggccgcattgaaggcgtggagcatgccatcgttggcgccgatgtaaactgcggcggtacgctggctgtgggccttgtagaaggcggtgtagtcgctttcggcgatggtgctggacggggccgccatgtagacggggcccgagttgacgatgtcgcccagcagtgagtcgcgcaagcgcatggtccccgtgctgccggtggattgctcctggctgcgctcgccacgcagatagctgagccggctctgggccacggtgtcagtctctgtcggcgcgagcttcagtgcggccttctgcgcggcgttgagggatttccattcgaaggtggcgcccgcacccgcgccggttcctgcattgtcggccgtgcccgacgggacccaggtcagcagattgcgggcagcggtgcgggcagtcagcaccttgccggcctcccaggtttcggtactggagatctgaacgccggtgtcgggatcattggtcaccgccagtgccgaaaggcgcccgttccatcgctggtcgaatccgggagtgaacaagagggtgtcgctcgccacctgggaagaggtcagtgccacgccagacaatgtgccggccgcgttgacgatttgcgcgaagaccttcttgatggaagcgatcatggcggccggctgcccggccaggaaccagttggcggggacgtcggatccgcccgacgattcccattcggcattgctggtgacggtggcgccgctggcccccttggtgcggaacggattgccatcaccattctggtcgtcaaagccgccgtattttgccgccaggtacatctggctgcggcgctgttcgtcgccgacgctgccgttcccgttctcattgacgtcgatgctgaacgtggtgacgcgcaattccggcatatccgggcggaagccgtaggtatgggcccaatacgcgacgccggccatatagtaggtgccgtggccgctggagccggtgtcggcgccagccaggttggcgagcgaggtgtcggggcggctgttgccggatgttcccgaactctcgagatcggccaccgcctgcgtccaggtcgtgacatcgaagctgtacttgctgtatttcgatatcgcgtccgccggccgggccgagtcgttggcagagaccggcttgccaccggagaggtaggtcgtcctggtgttgccgggaatgtagcggtcccagtgcgtattgatatcggcaatggcaaggacgtagttcttctggcaactggcaaggatggggtctgtccattgtgtgtagaccggaaatccatccttgtaggcgctggcgttgtcgatggcttcgggcgttggttgccggccttgcaggtagcggatgctctcgtagtagagttcgccgaccggatccaatgacttgtaggcgccggaacgcccgaactgattcaggtaattgatgacgccgctgatgttctctgacgcgctctcggggttctggatgaatacgccgtcgtcatcccattcccggcgcaggttgctggcttggttgaaattgctgtcgacggtgttcggccccacatacttcaggggcgcccgcaagacaccgccataacgggtattggcgctgtcgttcaggtagccaaacgcgccaaagcggaccttgtctgcattgcgctgcatttcgccaaccggcttgtacccggtgcgatacagcttgcagagatcggtgcgggacctcgcttcgcttgcatcgcagacttgcacccgtaccaggtaggtgccctggttcctgtacttgccggggctcgagcagctggcgccggactcggtgctgtccccaaagaacaccttgttgccacatgaggtgatgtacaaggtcctgctgctgaaaggcgtgaccgaggacgccttgtcgtaggtcttgcgggggaagtaggagttgctgttgaaaaaactctcctgcagcacggcacgttgcaggatggtctgtgtggcggagtcgacgacgcggtcacccccggtcagcgcgtagcgcagcatatcgatggccgaggccgtggcccagttcatgaagttgccgctgaactggcccgtgcatgtgtgatcggccgtgttggcgtcgccggcaatgacaaaatagccattgctggcgcttccgctgtagttgtagcacttgcgcggattgaagtagccaatgtattccgtggtcggcgaatacgtgccggagcgataggctgcccccaccgtggggaactccaccgagagcgtcagcagcaggttgggatggatattctggttgcggccgtacagcggcgcctgcgcgagcttgacggtcgcgaggctgctctgttccgttgcggcaagcagcaggccggcgggcaggctgagaagcgcagccattgccgcgaaaatgaatttccggatccggctcatttgccgtgctccgcgacaggcatggacgttcccattcattcccccttccggtagtacgactgcaacatgacccgggtcgccgggttagcgccaaagccgacggccgtgacgcggaagatgtatgcgccctcgctcgcgcctggcgacatgtcgctgatcggctcgatgatgtagcgcggcagggcggcaggcagcagcccgcctgtcgcggtcgggaacctgcggccggtgaaggtgccgtaggcggtggtgcgtgcgttggcgcccgtctggctgaagtcaacggcaagccagttcggcgtgccgtcgagcaccgggtcgcacaatccctggaagggtgaggcgcctgtcacgccggtattgcaacccgccacgaacggcagcacattcatcgtggtgccggagaagatggccgaccggctggttggggcggaaacaccctggatgtcgatttccgcatccagcaaggctgcctcggccgcttgctgagccaggtcccggtcgcgctggttcgatgccatgcgcttgctgccaatggccagccgggcaccggcgatggcgatgacgctgatgatcagcagcatcaccagggcggtgatcagcgcgatgccacgcgggttggggtgcgcggtgcgggtgttcatgtcggcgagcaggtggtgcaggtggccatgttccggagctgtacggtgacggtgtacaggcgtcgcatgcgctgcagttgcgtggccggcgtgaaggatgtgtcgttgcccggcgagcccgggaacaggcgcccgaacaggcgcaaggttggcggatcctgaggcgatgcgctggcggtatcgcccatcagcaccatggcaatctttatggcgacgacgttctgccaggtggtgggcagggccagcacctcggtggccgacaggaagcggtccggggtctggtcgaaattcgtatccatgccgtaaagcacctggaagacttcaacgcctgagatcagcgaaacagcctggtacgccgtgccggccgtgaggatttccttgttggcggcgtcccgtggacgatagccgcacatcagctgaggcatgccgccggcatcgttgctgacatagaagaccgccatgccgcgcgctaggtctgcgtcttcccaggcctgcggctcggcgacgccattgccggagcagtcgatcatgctgttgtccgggacggtgcggtcctgctgcgtgccggagccgaagaagcggacctgcagcacatcgctcttgttcacggcacccgcttgggccggacacgcgaggttttgcgccggattgccgagatcttgcgcgggggcgccgcagctgtcgaggccgctgatggtcggcgacaggctcgtggtggtgagcatgacgcctccggggctgggcgcgggaggcccgctggcgccgggagaggccgcggcgctgttgcccgcatagttgctccacgcggcctggcgcacgatccgaaccacggtatccaccgcaaaacggcctttctcatccagcgcagtggtgtcatcgatgctgttgtagttggctcgtccggtcaggtagagcgccgcggcagccatgatcaggagcaggctcagcgtcatcgccaccatcagctccaccagcgacagccccagttgacgatgccggccggcgttgagatacatcctggcgttccgcatgtcagttaaccgtgccctgcgtggccacgatgaccacctgggggcgcgtgcccatgtcggacatgtcgacccgtgccgcgacggttctggcggcaagccgggagatccagccgatcttgatgacaatcggtgcgtcgtccgcgcggccagtggccgatggcgtgcatccccatgagaagccggtggcctggtcgtaggcgaccatgtcccggcaaatcacggcgcgtccgccaggcaggcctgtgctgacacgctcccagaactcggcgacatcgaaatccgccagttgctgcgcgcacccggccgccgtgcccgggcaggcgatcgcgtacgggctgtttgctgccgtgagcgcgggcggctgcccggtggcagtgtcgatgaagtagcggttcgggatgatggcttccgccgccgcgccggtttgcgagacggccggattggcacgcatgcgctcggccatctcggtggccagctgcatggcagtggtgtcgtaggaagcttgttgcgtgaagcgggatgaattcagcagcaggctggcgacgccgagcacgccaaccgccagaacgacaattgccaccaatgcttcgagcatggcaaagccggctgccccgcggcagcgttgacccattctgacccccgtcaaaagacgtccgacttcgttaacttctttttttggtctgcaatcccgggcccttttaatatgcgacagcgggccttgcggaaatgcaacggggattaaacaacgattttgttacttttgctaccccttccggggggtggacgccgcaaactcatccagcacgtcgcggaattccgacacgtcctcaaagctccggtacaccgaagcaaagcggatatacgcgatcttgtcgagcttgcgcaattcgcgcatcaccagttcgccgacctggctgctggggatttctttctctcccagtgccagcagtttttcttcgatgcgggtgatggcttcgtcgatggcttcggccgagaccgggcgcttgcgcagcgccaggcgcatggaatccttcagcttggcgcgcgtgtagtccacgcgcgagccgtttttcttgacgatggcggggaagaacagctcgatccgctcataggtggtgaagcggcggtcgcaggcttcgcagcggcggcgccggcgcacggcatcgccgtcttccgacatgcgcgtgtcgagtacctgggtattggaatgaccgcaaaaggggcatttcatgccggaccaccttcagttgaaccccgtcgccttgtccgtgttgtcgttctgcggaggcggggcgggttggcgaggcccgcaagccggtgcccgaggacgccggcttgcggagctgccggccgctcatgcggaatccgcatgggcggcctcgatgcatcagccgtagaccgggaaacgcttggtcagggctgccgcctgctcgcgcacgctggcgatattggcggcgtcgtgcgggttgtccagcacatcggcgatcaggttgccgacgatgcgggcttcttcttccttgaagccgcgcgtggtcatggccggcgagcccaggcggatgcccgaggtcacgaacggcttttccggatcgttggggatggcgttcttgttgacggtgatatgcgcctcgcccaggatgcgctcggcttccttgccggtgatgttcttggcgcgcaggtcaaccagcatcacgtggctttcggtgcggcccgagacgatgcgcaggccgcgcgcgatcagggtctcggccagcacggcggcgttcttcaccacttgctgctggtattccttgaactcaggcgtcagcgcttccttgaaggcgacggccttgccggcgattacgtgcatcagcgggccgccctggatgccggggaagatcgccgagttgatggccttctcgtgctcggccttcatcaggatcacgccgccgcgcgggccgcgcaggctcttgtgcgtggtggtggtgacgaagtcggcgtgcggcaccgggttcgggtagacacccgcggcgatcaggccggcgtagtgggccatgtcgaccatgaagtaagcgccgatcgacttggcaaccttgctgatgcgctcgaagtcgatgcgcagcgcgaaggccgaggcgccggcgatgatcagcttgggcttcttctcctgggccagcttttccagcgcgtcgtagtcgatgtcttcctgggcgttcaggccgtagctgaccacgttgaaccacttgccgctcatgttcagggccatgccgtgggtcaggtggccgccttcggccaggctcatgcccatgatggtgtcgcccggcttgagcacggcgaagtacacgccctggttggcctgcgagcccgagttgggttgcacgttggcggcttcggcgccgaacagctgcttgacgcggtcaatggccagctgctcgacgacgtcgacgtactcgcaaccgccgtagtagcgcttgccgggatagccctcggcgtacttgttggtcagctgcgaaccctgggcggccatcacggccggcgaggtgtagttctcggaggcgatcagctcgatgtggtcttcctgacgctggttctcctgctggatggcggcaaagacctcggggtcgatctggtcgatcgtaaaacggctgcgttcgaacatggcgaaactcgtctgaaaaatagggaatccgattcacgcatcgggggtagggcgcgcggggaaggctagcggcgaccagcaccggcggcttgtaaccgtcggtgcagggcgcaccctgcttcccattcgctgcccaggcgagcggcaggcgcaagcaacttcacgcctaggcgtgctgaacgctacgcgaacgcgcaatgaacgtcacgccagagaacttgcgcttcctcgtggtagtgcccactgacttcgccagtcgcgcaagatggaatggttgcgcgcagtgtagcgcgaggcgggcgcccgccgcaagccgtcggccccgccaggcaagcgctggcaagggctggccagcaacttgctgttgcaaagtcgtcatgcgggtttacacgaaaccgctatcgctctccgttacaattgcggccatgacaaactttgtctggaccctgcgggtgtactgggaagacaccgacgcgggcggcgtagtgttctacgccaactacctgaagttcttcgagcgcgcccgcaccgagtggctgcgtgcgctcggcatcgagcagcaatcgctcgccgacgaggcgggcgtggtctttatcgtccgcagcacggcagtggactacaatgcgcccgcccggctggatgaccagctcgagatccgcacgcgcatcgaccgggtcggcccggcgtcggtccagttcacccaggaagcctggcgtggcgagctgatgctggcctctggcgcgatccgtgttgggtgtgtcgatcgaagcactttccgtcccgccccgattcccgaccccgttctagctaccatcaagtccgcacgatgaatcccgtgaccgtcacgcaagacatgtcgatcgtaacgctggtgctccacgccagcctgctggcacaggccgtcatggcgctgttgctcgtcatgtcgctgttttcgtggacctatatcttccgcaagcacctggcgctgcgctcggcgcgcacccagaccgaggggttcgaacgcgacttctgggccggcggcgacctgcaggcgctatataacagtgccgtcaacaaccgccacaacaccggcgcgctggagcggatctttgaatccggcatgggcgagttcctgaaggcgcgcgagcgcggcaacgaagccggcgcgctgctcgatgcggcccggcgcgcgatgcgcgcggcctaccagcgcgagatggatgtgctggaatcgcatctgccgttcctggcgtcggtgggttcggtgagcccgtatatcggcctgttcggcacggtctgggggatcatgaacgctttccgcggcctgtcgaatgtgcagcaggcgacgctcgcatcggtggcccctggtattgccgaggcgctggtggcgaccgcgatcggcctgttcgctgccattcccgctgtgatcgcctacaaccgctatgccacggagatcgaccgcctggcgatccggttcgagagcttcatggaagagttcctgaacatcctgcaacggcaggcacgctaaccgcacacgtatcgaatctaatccagacggtccgggcgcaagcccgggccggcgtttccaggagtcctgcaatggcagccattcagcgccgtggcggctcgcgccgccgggccagcgccgacatcaatgtcgtgccgtacatcgacgtcatgctcgtgctgctggtcatcttcatggtggcggcgccgatcgtgagccccgccaccgtcgacctgcccaccgtggccaacgccacgccgcagcagaaggcgccgccgatcgtagtcaccgtgcacgagagtggccagctgaccgcgcgcggcaaggacagcgccggcaatgccttcgagcgcaagctcgacaagcagggcctgctcgacttcgtgcaccagcgccagaacgagaatcccgaccagccggtggtgattgccgccgaccgcgcggtcaagtatgaggcggtgctggacgtgatgtcgatcctgaaagccgacggcgtcaagcgcgtcggcctgatggtcaagtccaagacctcctgacgcattgaagcgcctatctgattgccgttgcgcctgatgaagaccgtcgccgcctatccctaccagccggtcaaggagcggggaaccctgcgttccttcctgttcgcgctcttcatgcacatgctgctggctgtcgtgctgtactacggcgtgcgcttgcagagcagcacccccgtcggcgccgaggccgagctgtgggaagagattccggccgccaccgcgcccccgccgccgccgccggagccggtggtgcagccgcgcccggccccgccgctgcccgaggtgaagagcaaggtcgaggacgacgccgacatcgcgctggaacgccagaagcgccgtgccgaggcggcggcgcgtgaagaggccgagcgcaagcaggcggctgcccgcaaggaagctgagcgcaaagaggcggaacgcaaggaagccgcgcgcaaggaagcggagcagcgcgaggccgagcgcaaggaagcccagcgcaaggacgacgcgaagaagaaggcagcgcagcaggaacagcagcgcaaggaacaggccgagcgcaaggaagcagaacgcaaggaagcggacgccagggccaaggcccaggcggacgccaaggccaaggctgacgccgagaacaaggccaaggccaaggcggatgccgacgccaaggccaagcgcgaggctgcggccaatgcccagcgcaagagcgagctggcgcgcctgcaggcgctggccggcggctccggcgcgggcggcggcggcgtgggcagtacggccggcgcgggtgccggcggcggtggcaaggcgtcgccgggctatgcggaccgcgtgcgccgccgcgtcaagccgaatatcgtctttggcgaggacgtgccgggcaacccgaccgcggtggtgtcggtgcagctggcgccggatggttcgctgctgtcggcgcggctgtccaagtccagcggcaactcgggctgggataatgccgtgctgcgcgcggtggaacgttccgacccgctgccgcgtgatgagaacggcaaggcgccggccagcttcaccattaccttccgtccgaaggactgagtggcctgggcggcatgatttgcaacataatgcaaccttcatcgccgggtcttggtcccagcgctagcatgacaggttgcctgacgcggccggcagtgtgcgatacgcacgcagacggggcatgcgccacgcgctgcaatgccgcatttgcccgtgttgccgattgcctgccgtgcccgacgaaacttgaaatcgactgaggagcagcatgcgaaagctttgggcccccaactggctgtccgcgaggcggcacaacgcaacccaacccgaatcccaacgcgccatcggccggcatccgctggccggccgccgcgcgctgatggcctggctggccgcggcgatgacgatggcagccggcgccgcgcacgcgcaactcaacgttgagatctccggggtcggctccagccagatcccggttgcgaccgccaacttccagggcgaggcccaggccccgcagaacctgaccgcgatcatccgcgccgacctggcgcgcagcgggcgcttgcgcaatgtcgatccgggcggcgccacggtggcggaatccgccaatgtcgacctgggcagctggaagtcgcgcggcgcagatgccttcgtcgccggcagcgtgaccccggccgccggcggcaagtatgaggtccgcttccgcctgtacgacaccgtcaagggccagagcctgggcgggctggcctttaccgtcaaccagtcccagctgcgcgtgaccgcgcacaagatcgccgactacatctatgaaaagctgctcggcgagcgcggcgtgtttgccacgcgcctgtcctacgtgtcgaaggtcggcggccgctaccagctgctgatttccgactccgatggccagaacgcgcaggtggcgctgaccagcaacgagccgatcatctcgccgtcgtggtcgccggacggcgcgcgcgtggcctatgtttcgttcgaggccaagaagccggtggtgtatgtgcacgacctggccagcggcaagcgcaccctggtgtcgaaccagaagggcaacaacagcgcgccgtcgtggtcgcctgatggccggcacctggcgctggcgctgtcgcgagacggcaatacccaggtctaccaggtcaatgccgacggttccggcatccgccgcctctcgcgcagcagcgccatcgacaccgagccgcagtattctccggacggcaagagcatctacttcaccagcgaccgcggcggtgcgccgcaggtctaccgcatgcccgcttccggcgaggaaggtggcggtgcgcaacgtgtcaccttcaagggcagctacaacgtcagcccgcgggtttcgccggacggcaagtacctggcgtacatctcgcgcgcgggcggcttcaagctgcagctgcaggacctgagcaacggcgacgtgacgtcgctgaccgatacggccaacgacgaagcgcccagctttgccgccaacggcaagtacattctctatgccacccgcgtgggcggtcgcgcggtgctggcggcggtttccactgacgggcgtacccggcaggttctgtccctccagtccggcgatgttcgcgagccgtcctggggtcctttcatgcaataacaggagtcattcaccatgccccaactgatgagcaaaacccttgccgttgccgcactgctggcccttggcgcctgcagctccggcgtcaagctggacgacaccgccaaagccggtgccggcgcgggcaccggtgccgatccgcgcgcagtgaccccggtcacggccgccgatccgctcaacgatccgaacagcccgctggccaagcgcagcgtgtacttcgacttcgacagctacacggtcaagtccgactaccagggcatgctgggcgagcacgccaagtacctgggctcgaacaagggccgcaagatcctgatccagggcaacaccgacgaacgcggcaccagcgagtacaacctggcgctgggccagaagcgcgccgaagccgtgcgccgctcgctggcttcgatgggcgtgcccgacggccagatggaggccgtcagcctgggcaaggaaaagcccaaggccaccggccatgatgaagcctcgtgggccgaaaaccgccgcgcggacatcaactactgatctctgatctctggactgcctttcatgaaagcacgcgtttccaccctgttgtggctcgccgccgtcgccggcggcggcatgctgccgctgtcgcaggcgcatgccggagtgttcgatgatgacgaggcgcgcaaggcggtcatcagcctgcgcgaccagttcaacggtttccaggcaaccgcgacgcagcgcatcgagcagaacagccgtaccacgctcgacatgcagaaccagctcgagggcctgcgccaggaagtggcgcggctgcgcggccagaacgaagtgctgcagaacacggtggacacgctgcagaagcagcagaaggactactacgccgacctggacgcgcgcctgaagaaattcgagccgcagcaggttacggtcgaaggccgcgaaggcctgtcgcagccgggcgaaaagcccgaatacgatgccgcgctcaagcagttccaggcgggcgacttcaagagcgccgggagttcgttctcggctttcgtcaagaagtacccgcagagcccgtacgtgccgctggcgcagtactggctcggcaactcgctgtatgcgcagcgcgactacaagggctccacctcggtgctgcagacgatgatcaataacaacccgacgcatcccaaggtgccggacgcgatgatcgcggtcgccaacaaccagctcgagtccggccagaaggcggccgcgcgcaagacgctggaacaggtggtggccaagtatccgggcaccgaaggcgcgcaggcggccagcaaccggctgaagacgttgaagtaacaccggaagcggccggcttgcccggtcctgtctgcaaggcccgcttcggcgggcctttttcttgggtcgcgctaaaatacccgattcgcctgaatcttttgcgcgccgaggcggcgcgcttcccatcatgaccaaacgcgccatcgtcctgctgtccggcggactagactccgccaccgtactcgccatggcccgcgcccagggcttcgagacctatgcgctgtcgatgcgctatggccagcgccactcctctgagctggaagccgccaggcgcgtggcggctgcgctgggcgccacccgccacgagatcatcgacctggacctgcgccgcttcggcggctcggcgctgaccgacgacgcgctggcggtgccgaccgacggcgcttccgacggcatcccggtcacctacgtgccggcgcgcaacaccatcatgctgtcgctggcgctcggctgggccgaggccgtcggcgggcgcgacctgttcttcggcgccaacgcggtcgactactccggttacccggactgccgcccggaatacgttgcggcctatgagacgctggccaacctcgccaccaaggccggggtcgagggcgaccgcttccgcgtgcatgcgcccatcatcgacatgaccaagggcgagatcatccgtgccggcatcgcgctgggggtggactacagcctgacggtgtcgtgctaccaggccgacgacgacggccgcgcctgcggcgtgtgcgattcgtgccgcatccgccgggccggctttgaagccgccggtgtgcccgatcccacccgctaccaggccgctgcctgatcacaagccgacgtccacgcccctacatgcctgaaatcgacctcgccgcgctctcgcgcaccgtgctgctgagcacgttcatcctgaccttcctgtttggcgccgtgctgcagcgcacgcacttctgcaccatgggcgcggtctctgacatcgtcaacatgggcgactggagccgcatgcgcatgtgggtgctggcgatcggcgtggccatgatcggcaccggcgtgctggcctggaccggcgcgatcgaccctaccaagaccatctacaccgccagcaagctgggctggctgtcggcgctggccggcgggctgatgttcggcttcggcatggtgctggcgtcgggctgcggcagcaagacgctggtgcgtatcggcgcaggcaacctgaagtcgctggtggtctttgtcttcctgggcctgtcggcctacatgacgctgcgcgggttgttcggcgtggtgcgagtgaataccgtcgatgcggtggcgctgacgctgcccaccacgcaagacctgccgtccttgctggcgcagggcacggggctcgcgcgcggcgcactgcagctgggcctgggcctggcgctgggcggcgtgctggtgctgtgggcgctggcgggccgcggcttccgctcgttcgacaacctgcttggcggcatcggcgtcgggctgatcatcgtggcaatgtggtatgtctcgggccacctcggctatgtagccgaagaccccaatacgcttgaggaactgttcgtctcgaccaacagcggccgcatggaaagcctgagctttgtcgcaccctatgcctacacgctcgactggctgatgatgttcagcgacaagagcaaggtggtgacggtcggcatcgtcagcgtgttcggcgtgatcgccggcgcggcggcctatgccctggccacgcgcacgttccgctgggaaggcttcggcaatgccgaggacgtcgccaaccatatggtcggcggcatcctgatgggtgcgggcggcgtgaccgcgctgggctgcacggtcgggcagggcctgtcgggtgtgtcgaccctggcgcttggctcgtttatcgcgctggcgggtatcctggccggtgcagtgctggcattccgctaccagatatggcgtctggagcgcatggcctgaggagcgtgcttgacacatcgagaaccgcatccctataatcgcggttctgttttttcgggtcgttagctcagtcggtagagcagcggacttttaatccgttggtcgcgtgttcgagtcacgcacgacccaccagtattacgaagggcctgtggcgcaagccacaggccctttttgcgtctggcatgccccgctaacgggggaggcctttaactagttcgaggtagagacttaggcctgcctgcgcagcacaatgggtcagccgcggcgtgttgaccgcggtccatcagaacggccgcgagacacggcccaccaacaagaccctatgcggcaagcaggcgtttccttgccggccagcgggcacgtgctgcgcattatctggccgttcgtaccggtggtcgttgcgctggcgttgttcagcatcgccagcctggacctgttgtcggccgcgcgcgcctttgtcgcgggcgagagccagtggtccaggggccagaagaacgccgtgctgcacctgctgcgctacggcgaggatcgcgatccggcggatttcgaggcatacctggagtcgatcgcgatcccgctgggcgaccaccgcgcgcgcctggagctcgaccgcgacgagcctgacctggagcgcatccatgaagggctgcttgccggcggcaaccaccccgaagacattgcgcggatggtgcggctctaccggaatttccgccatatccaggaggtcgatgccgcgatccgcgtgtgggccgcgggcgacatcgagatctctgcgctgcacgaacaggcactgaccctgcgccggctgaccagccagcccggctgcggggatgagtgcgtggcgccggtgctgcgcaatattgcgcagatcgacgccaggctgacgccgctggagcgggccttttcgggccatctgggccaggcctcgcgccgcgtgacgcggctgctgaccaccggcagcgcggtgatggcggccgcgctgctgatgtcggcgatcctgctgtcggtggcgccgctgcggcgcgagcgccggctgcgcgaggcgctggcgcagcgcgaagagcagctgcagctggcggtggagggcagcaacgacggcctgtgggactggcatctcggccgcggcgaactgtacttctcgccgcgctgcgcgcagatgctgggctaccaggacgccgaactgccgcatgcgcgcgaaaccgtgctgggcctgctgcatccttccgagctggcagccttcgaggccaagctggcccaccacctgcgcagcggcgatccctacgacgccgaattccgcctgcgcaaccgcgccggcgattacctgtgggtgcgcgcccgcggccggctggtgcgcggggcggggcgccggcgcgcgcgcatggcggggtcgctcacggatatttccgaccacaagcgctacgagacccagctctttgccgagaaggagcgcgcccaggtcacgctgcaggccatcggcgacgcggtggtgacagccgatgtgtgggggcgcgtggaatcgctcaatcccgcggccgaggccctgaccggctggcgcgaagccgacgcccgcggcctgccgctgagcagcgtgtgcgtgctgcgtgacgaggaaagcctggcgccgctgcccgatattgtcacgctggcgttgcggcagcgctggcgcagccggtcggcgcagctggtgcagcgcgatgtgtccgggctgcccggacaggcgctggcggtcaagccatcggtggcgctgatccgcgaccgtgccgcgcaggccatcggcgtggtggtggtgctgcacgatatcagccaggaacgcgcccatgcggcgcggctcgcgtacgaggccagccacgatgcgctgaccggcctggtcaaccgcgccgagttcgagcgccggctggacgcggcgatcacgcgggcacgggtgcagggcactacccatacgctgatgtacctggacctggaccagttcaaggtggtcaacgacacttgcggccatgccgccggcgacgaactgatccggcagatggctgaggtcatgcgcagccagctgcgcctcagcgacacgctggcccggctgggcggcgacgagttcggcgtgctgctggagcaatgcggccacgccgacggcgaacgcgtggccgaggccttgcgccacgccattgcctgtttccgctttgcgcatcgccagcgcaccttcacgctgggtgtcagcatcggcctggtgacgctggatcgccagaccgtcaacgtcgccgaggcgctgagcgcggccgacgcggcctgctatgtggccaaggagggcgggcgcaaccgtgtgcaggtctaccatccgctggacagcgtggtgcaggcgcgccacggcgagatggagtgggtcagccgcgtgcatgcggcgctggcggctggccgcttctgcctgtactcgcaggagatcgtgccggcgcacgatggcgcactgccgcagacgggccgtcatgtggaactgctgctgcgcatggtcgatgaacgcggccggctggtgccgccgatggccttcgtgccggcctgcgagcgctacaacctgatgccgatgatcgaccgctgggtggtcgagaccgcgtttggcaccctggcgggacggcaggcggagattgccacctgcgcgatcaacctgtcaggctcgtcgctggcggacctccagtttcccgatttcgtgcgcgagcaggcgcagcgcttcggcatcgcgctggacggcatctgcttcgagatcacggaaaccgcggcgatctccaacctggcacaggccggcgcgttcatcctgcagttgcagcagctgggctgcaagtttgcgctggatgacttcggcgcgggcatgtcgtcgttcacctatctcaagcatctgccggcggcctacctgaagatcgacggcagcttcgtgcgcgacatgctagccgacccggtcaacctggtgatggtggaggtgatccagcgcatcggccacgccatgggcaagcagaccattgcggaattcgtcgagggcgaggccatgctcgaacggctgcgcgagctgggcgtggacctggtgcagggctaccacattgcttcgccggtgccgtttgccccggcggatcccaaggccggtgaccggccggcgctggcgctggcgggctgagccgccaggcgcggcggcgggtcagggaacgagcggatcgcggaagccggtatcggcgccgggcggggtgccggccggcgcgggcgtcggcgcggttgcgggtggcacggcctggtgcctggcctcgcgccaggtgttgtacacccagtaggcggcgccggctgccaggccgaccttggacagcttccaggtccagcgcagcaccggcgtgcgcttgaccagcggcagcgccagcgtcaatacggtgctcagcagcgggtagtccttggtcatgccgaccactttcatccacgaccccggacgggcgatgcgcggcagccaatggccaatagtgcccaggcggtgcgcgccaccccgcacctcatgcagggcctgcaggcagtcgtagcgttccagcgcggcgcgggtcagcagcagttccttgcgcaccgccagcggcaggcgcacctcttgcgtgaaccgggcccgccgcgggtgattgcggcggtcgtgtccggcagcgctgtggtcgggttccagggggctcatcggcgcaggatctcccggtctttgtcgatttcggcgagcgtggcctccagcatcggcggggcgttgcgcaccaggttgcgtgcgtacgcgaggcaaatcgcgcacagcacgagataaaggaccgtcagtgcgcccagtgcctgccagcggtaggtgtcccagaacaggatggcgatcagcccggtcagggtgaccagcccgatgccaaagaacaccaggccgaagcaggccagcagcgcgaccttcatcaggcgcgtgcgttcctcggcaagctccacgctggcgagttcgaggcgggtctggatcattgccaccagcgagccggccaggttgcgcacggattcgaggaacttgggggaagggggggattcgctcatgcggctccggcgtgaaagagcggcgcgacggcgaggccgtacgcgcctttccagcaggcggggccgggtttggcgccatggcgtgccgccagccccggccactggcaacccgatgaccgggttgccgctcaggcgcggcaccagcatgccgcgccgggttggaatcgcttacttgcggttcagcagcagaccgatcagcaggcctacgccggccgccacgcccacggcgcgccacgggtggtcatgcacgtagtcgtcggtggcgcgtgccgcggccttgctcttggtcacgacggcgtcttgcaggtcctgggccttttccttggcttgcttgagcaggcccatgccacgctcgcgcagttcggcggccttttccccggtggtcgaggcggcttgcttcagcagttcctcggcgtcggacagaacggtcttgacatcgctcatcagtttctcctgtttgcgggcggttggttcggtttgtgcggattctgacattttctacgctccgaggctaacggcatttgtcggtctgatacttagcatatgtggcgggcggcggtggtttcaaggctacacgccagcaagcgcgactctgcagtgcctggtatcgcaagcatgccggaaagcacgcgtgatcaatgtcacaaaatgtctttatgacttcgagtgattttgtagtgactttatattcgtttgggttggatatcaatccggatactctggttccaccccgaaatcaggagaacagaacatggctttgcgtcttggcgatatcgccccggacttcgagcaggattcgagcgaaggccgcatccgcttccatgcgtggcttggcgacagctggggcgtgctgttctcgcacccggccgactacaccccggtgtgcaccaccgagctgggcctgaccgcgaagctgaaggatgaattcgcacgccgcggcgtcaaggcgatcgcgttgtcggtggacaacgtggactcgcaccgcggctggatccaggatatcaacgagactcagtcgaccacggtcaacttcccgatcctggccgatggcgaccgcaaggtgtcgcaactctacgacatgatccacccgaacgcgaacgagaccctgacggtgcgctcgctgttcatcatcgacccgaagaagaaggtgcggctgatcatcacctatccggccagcaccgggcgcaatttcaacgagatcctgcgcgtgatcgactcgctgcagctgaccgacaaccacagcgtggccacgccgggcaactggcaggacggcgacgacgtggtgatcgtgccctcgctgaaggacgaggcggtgatccgcgagaaattccccaagggctaccaggcggtgcggccgtacctgcgcctgacgccccaacccaacaaatgaacgcggccccgcgtgaaggcggggccggcgtgcaggacaggtgttttatcgacgggggcagcctcgtcgtctccttggtagtgtgcttggcccggccttacagccgggcctttttactgcggagagcctgtgcgcaagtcgcggatggcgatcagaagaaggcctgcaggccggtctgggcgcggcccaggatcagcgcgtggatgtcgtgggtgccttcataggtgttgaccacctccaggttcaccacgtggcggatcacgccgaactcatccgagatgccgttgccgcccagcatgtcgcgcgccacgcgggcgatgtcgagcgacttgccgcacgagttgcgcttcatgatcgaggtgatttccaccgcggcggtgccttcgtccttcatgcggcccaggcgcaggcagccttgcaggccgagcgtgatctcggtctgcatgtcggccagctttttctgcaccagctgcgtggcggccagcgggcggccgaactgcttgcggtccagggtgtactggcgcgcggtgtgccagcagaattcggcggcgcccagcgcgccccaggcgatgccgtagcgggccgagttcaggcacgtgaacgggcccttcaggccgctcacgcccggcatgatgttctcttccggcacgaacacctggtccagcacgatttcgccggtgatcgaggtgcgcaggccgaccttgccgtggatggcaggtgccgacaggcccttccagcccttttcgaggataaagccgcggatcgcttccttgccgtcgtcgccttgcagcttggcccagaccacgaacacgtcggcgatcggcgagttggtgatccacatcttggcgccggtcagctcatagccgccgtcgaccttcttggcacgggtgaccatcgagcccgggtcggagccgtggttcggctcggtcaggccgaagcagccgatccattcgccggtggccagcttgggcaggtacttctgcttctgcgcttcggtgccgaattcaaagatcggcaccatcaccagcgacgactgcacgctcatcatcgagcggtagcccgaatcgacgcgctcgacttcacgcgcgatcaggccgtagctgacgtagttcaggcccgggccgccgtattgctccgggatggtggggccgagcaggcccagttcgcccatctcgcggaagatctccacgtcggtcttctcgttgcggaacgactgcagcacgcgcggcatcagcttgtcctggcagtacgccgcggcggcgtcgcgcaccatgcgttcgtcggcggtcagttgctggtccagcagcagggggtcggcccagtggaattcggcgttggcagccatgcaggtctccttcggtagcgcgggggaagcatcgggggcggggcgaatggtcgcttgccgcaccggcgcttccgggaatcatgacgggttcggtgatcttcgcggagggtttttgtggttccgcattgcggaactgtgttccgttgaattagtatatcgcaatggttttgccgtgcaacaggcaaaacccccgacacccatgcctttgtgcgatgagcggacaaccgccgacctgagaggagccgccttgaccagtccgccactttctcccgatgccacgccgcccgcgccggtgcgcgacagcgatcccaacttcgtcaccgcgctggcgcgcgggctggagctgatgcgctgcttccgcaccggcgaggcaatgctcggcaaccaggacttcgtgcgccgcaccggcttccccaaggccacggtgagccggctggccggcacgctggtgcagctcggttacctgcgctatgacgaaagcctgggcaagtacgcgctggatgccggcgtgctggcgctgggctatgcctacctgtcggcgtcggacgtggtgtcgctggcgcggccgcatatgttggcgttcgcgcagtcatacggggtctcggtctcgctgggcaagcgcgagcgcatggaagtgatctacctggaatcgatccgcaacgatgcgggcgtgatgctggggctgagcgtgggctcgcggctgtcgctggtgtccagttcgatggggcgggcatacctggccgcgctgccggcggcgcggcgcgagcgggtcatggctgagttcagccaggcttttccggagcagtggaagcagcaggagacggccacgcgcgcggccctggccgaggcgcagcagcgcggctatgcggcgtcgttccgcgactggcatccagccatccatgcgtgtgcggtggcgttccggccggtgggggagaaggagctgcacatgctgagttgcagtgcctcctatggggcggtggatgagtcggtgttccaccagacgctggcgccggcgttgcgggcgctggcggcaaggttgtcggacccggcggggtgacggccaggtccgacgcgcgcaggcgttacaggtccgtgcgcagcttccacagttccgggaacagcaccacgtccagcatcttgcgcaggtagctgacgccctcggtgccgccggtgccgcgcttgaagccgatcacgcgttcgaccgtggtcacatggcggaagcgccactggcggaacgaatcctccaggtccacgaacttctcgccgagctcgtacagttcccagtgcgccgacggattgcgatagacctccagccacgccgcctcgaccgaggcgttgtacgcagtcggctgggtccagtcgcgctccacgcaatccgcatcgaccgcaaaaccacgccgcgccatcagccggatcgcctcgtcataaagcgacggcgtcttcagcgcggtctccaccaaggccaggtgctccggccggtgcgcatgcggtttcagcatggccgcgttcttgttgccgagaatgaactcgatctcgcgatactggaacgactggaagcccgacgacatccccaggtaaggccgcatcgcggaatactccggcggcgtcatcgtcgccagcacgttccacgcctgcaccagctggtccatgatgcgcgacacccgcgtcagcatcttgaacgccggcggcaggctgtcggccttgaccgactcgcgcgcggcgcgcagctcgtgcagcatcagcttcatccacagctcggtggtctggtgctgcacgataaacagcatctcgttgtggtccggcgacagcggatgctgcgcgctcaggatctggtccaggccgagatagtcgccatagctcatgtccttggcgaagtccatctgcgcgccgtgccagccctcgccctgtgctttcgtgcctgcctcgctggcagcgccggagaaggggcatcccttgaattcactcatgatgcgctcccgatcaggtcacctggccgcgcgtctggaagcgcgcgtcgcgataggcgccgctgtccagcacgtcgcgcaggatttccacagcatcccacacctcggcgaagctggtgtacagcggcgtgaagccgaagcgggcgatgcgcggctcgcggtaatcgccgatcacgccgcgctcgatcagggcctgcaccagcgcatagccgtccgggtgctccaggctgacctggctgccgcggcgcgcgtgctcgcgcggcgtgaccagcgtcagcgggtggtggccgcagcgcgcctccaccagttcgatgaacaggtcggtcagcagcagtgacttggcgcgcagcacctgcatattggtctgggcgaagatgtccaggccgcattcgaccatcgccagcgaggtcacaggctgcgtgccgcacaggaagcggcgcacgccttccaccgggcgatactgcggatccatcgcgaacggcgcggcatggccccaccaacccgacagcggctgccagaaggcatcgcgcagcgccggcgcgacccacacgaaggcgggcgaacccgggccgccgttcaggtacttgtaggtgcagccgatggcgtagtcggccccggccgccttcaggttgaccggcaccgcgccggcggagtggcacaggtcccacaccgtgagcgcgccgcgggcgtgggcgagttcggtcagcgaggccatgtccagcatctcgccggtcttgtagttgacgtgcgtgagcatcagcacggcggtgtcggcgccgacggcggcgtcgatctcggccggcgaattgaccaggcgcagcgaatagccctgctgcagcaggtcggccaggccttgcgcgatgtacaggtcggtggggaagttgctggcctccgacacgatcaccttgcgcgccgggtcgcgcgtctgctgcacgcgcagcgccgcggccagcaccttgaacaggttgatcgaagtggtatcggtcaccaccacctcatcctggccggcgccgaccagcggggccagcttgttgcccagccgctgcggcagctcgaaccagccggcggtgttccagctgcggatcaggccctcgccccattcctcggccaccacctgggcggcgcgagcggcggcggcgcgcgggcgcgcgcccagcgagttgccgtcgaggtaggtcacgccctcgggcagagcgaactggtcgcgcagcgggcgcagcgggtcttgctggtcgagccggatacagtgctcgcggtcaaatgtcgtcatgtcgtgggattggccaggggttgttcgggaatggttcagtcgaggctgcgcagcaccgcgcgcaccgggctggcgtcgagcccggcaaagcgcagcggcagcgcgatcagttcgtagtcgccggcatcgacctcatccagcacgatgccttccaggatggcgagcccgtgcctgcgcacggcgttgtgcgcgtccatggtcttggattcctgcgggtccagcgacggtgtgtcgatgcccaccagctgcacgccgtgcgcggccagcagcgcgatggtctcggccgcgactgcgcagaagtgcgggtcccactgcgccagcggcgcctgccggtaggtgcgcagcagcacgcgcggcggcaggccggccagcgcgtgttcgatatggcgcggctcgaccaccggcgaggcgccgatgcaatggatcacgcggcaggtgccgaggtagggcgtgagcggcacggcgccgatcggcgcgccgtcggcggcgtagtgcagcggtgcatcggcgtgcgcgccagtgtgcggcgacagcgtgatgcggccgacattcaccgggcagtgctcgtccatctgccaggccggctgctgctggaacggcgtgtcgccgggccagaccggggtggcgggggagagcggcgggctgatgtcccacagccggcgcgggtcttgattgggggcggtcataagggtgcgcggcgcctttgcaaggcgccgtcgttgtctgcctcgatgacggaaatcatagtcaaaattgccggcaagaggcttgctaaatggaccgtcgatgcggtcatctttcgcataaaatgcgaagaattgatgattagtcgaaggaaattcgaatgaacctcgatcccaccgacctgcgcatcctgacctgcctgcaggagaacggccgcatcagcaaccaggacctggccgaccgcgtggcgctgtcgccttcggcatgcctgcggcgggtgcgcctgctggaagagtcaggggtgatcggcggctaccgcgcctggttcgacgccgagcagctcgggctggagcttgaggcgatcgtgcaggtctcgatgcgccatgatgtggaaggctggcacgacacctttatcgccgcggttcagtcgtggccggaagtgctgtccgcgtacatcatcaccggcgacagcaactacatcctgcgggtgcaggcgcgcaacctgaagcactactcggacttcatcgtgaaccggctgtaccgcaccaagggcgtgatggatatccgctcgaacatcgtgttgcagcgcatcaaggtggacagttcgccgctggcgatcctgaaggcggcggagggcgcctagcgttgcgtatgcagcgcaatcagctgccgcagggcttctttcagcagcgcgccctggcgcgggccaaagtcgtccagcactgcgcgctcgtgctgggcggcgcgtgccagcagcggctgggccagcgcgaggccgcgcggggtgatcgagatcagcgcctggcggcggtcggcctggccggcgcggcgcgtcaccagcccgtcggcggccatgcggtcgaccagcttggtcagcgtcggctgcttggtcagtgtgatttcggcgagcgtgccgatggtgcagtcggggcggtcggccagcgtggccagcacgcgccattcctgcacggacaggccgctggcctccacttcgcggtggaattcgcccgagatcaggtggctggcgcgggccagcaggtaggccaggtagccatcgacaaagggcaggggggattgcgcgggcaggtccgccatgatgggcccggtgccgttcagaggtcgaggggggcggtggtggtgaactggccgccctggaataccagcgggccgtcgccgccatcgagcacgccgcagcgctcgacttcacccacgaagatgatgtggtcgccctcgtcgtagcggctgcggttgtggcattcgaaccaggccagcgcattggacaggatcggcaggccggtggccgagagccggtagtcgacgccggcgaaacggtcgcccttgagggtggcgaagcgctggcacagctccagctgcgaggtcgacagcacgttgatgatgtagtgggtgccgtcgcggaacatcggcaggctgttggcgcgcgtggccatgctccacagcaccagcggcggatccagcgacaccgaattgaacgaactggcggtgatgccgatgaacggcggcgcgccggcggcgaccgacgcggcgctggcgcgcgtagtgatcaccgtcaccccggttgcgaactgcgacagggtgcggcggaagtgctgcgcatcgaaatctggtgcggcggcgctggtgatctgtggctgggcctcaggcatgcccatgggggctccgctggagttcatgaaatttcatatatattattcgcgccatgggcatcgagtacaagcccggcgaccaccaatccgcgatgcgggcgttggctggcgcacaaaaccaggcgagccctgccgccatacaagaacaaccggagacaagtcatgctcatcgagcagatcgaacaccgctggctggcggcgttccggcgcacgctggaactctgtgccctgcagggtgcggaagtcgttggaattgtaacggagtcgcaatcccgccctgtcaacgtggccttggccgaactggccgtgcagtcgctgggcgccaccccggtgcggatccaggtgccgacaccggcacttggcgcgcccgcgccggtgcgctccaccggcgccagcgatgccttgcagggcctcgcgccggtggtggcggccttgtcgcgctgtcacctggtgctggactgcacggtggaaggcctgctgcacgcgccggaactgccgctgatcctgcgcggtgccgacggcatcgtgccgcgcatgctgatggtcagcaacgaacatcccgagatcctggaacgctgccagcccgacccggcgctggaaggcaccgtgcgcgccgccatgaagcgcctgcgcggcgcgcgcgagatgcgcgtgcattcgccggccggcaccgagctgcgcatcggcctggccgacgcccgcgtgggcggggtctggggcttctgcaacaagcccggccaggtatcgcactggcccggcgggctgtgcctggcgtttccggccagccgccaggtcaacggcacgctggtgctggcgccgggcgacgtcaacctgaccttcaagacctacctgcgcgataccgtggtctgccatatcgaggacgactacatcgtcggcgtcgaggggcagggcgtcgacgccgacatgatgcgcggctactaccaggcctgggccgatcgcgaaggcacgcgcgatgcgtatgcggtctcgcacgtgggctggggcctgaaccggctggcgcgctgggacgcgatgactttctacgacaagcgcgactgcaacggcaccgagctgcgcgcgtttgccggcaacttcctgttctcgaccggcgccaacgaggtcgccgggcggcatacgctgggccatttcgacctgccgctgcgcaactgcacggtgtcgctggatggccgcaacgaggtggaagcgggcacgctggtggaggtggcggcatgagcgcgaccgcgacgatgcaacgccacgccaacggcatcgccacgctggcctggggcgatggcccggtggcggtggtgatgctgcacggcatcggcggcggcaaggccgcctggcccgcgcagggcgaggcgctggcgcaggccggctaccgcgccgcggcctgggacatgcccggctacggcgacagcgccctgatcgatccctatgacttcgacgggctggcgcaagcgctggcgccgctgctgcaggccgagcgcgacgccggccggcgcgtggtgctgctgggccacagcatgggcggcatggtggcgcagcaggcctgcgcggccgcgcccgcgctgatcgacggcatggtgctgtccggcacctcgcccgcctttggcaagggcgacgggccctggcagcgcgacttcatcgccgcgcgcaccgcgccgctggacgccggcaggaccatggccgagatggccgccgggctggtgcgcaccatggtcgcgcccgatgccgagccacaagccgtggcctttgccacggcggtgatggcggcggtgccggcgccaacctaccgcgcggcgctgggcgcgctggtgcgcttcaaccagcgcgacgcgctgccgcgcatcgcggtgccggtgctggcgctggccgggcagcacgacaccaatgccgcgcccgaggtgatggagcgcatggcgcagcgcattcccggcgccgaataccgctgcctgccggatgtcggccacctggcctgtatggagcggcccgcgctgttcaacgaagcggtgctggatttcctgcagcggcgcttccccgtgcactgaaccacgccgcttcccggcaacgcaacacaagaaccgccgcagcgccgccaccgcatccggcgcgagcaggaaaacaggagaccgcgacatgccatccggacagctcgacttcattcccgccatcggtacggcggactttaccccgcaacaagcgcgcctgctggcgctggccaaccgcctcggccgcgagcgcttcgccgcgcgcgcagccacctgggaccgcgaggccagcttccccttcgccaactatgccgacctgcgcgaggccggcctgctggccctgtgcgtgccgcaggcgttcggcggcgagggcgcggactttgccacctactgcatggtcggcgccgagatcggccgcttctgcggggccacggcgctgacgtacaacatgcatatctgctcgaccatgtggaccggcgtgctgtccgacggcatcgacatgacgcctgagcagcgcgccgagcacgaagcccggcgcgagctgcatttctcgcgcgtggtgcgcgatggcgcggtctatgcgcagccgttctccgaaggctccgccgctgccgcgggcaaggcgccgttcggcaccaccgcgcgcaaggtcgagggcggctgggtgctgaacgggcgcaagatcttcgcctcgctgtcgggcgcggccgactactacggcatcctgtgcaccgaggaccgcggcgaccagcatcccgacatgcgcgacacgctctatatcgccgtgcccggcaaggcggaagggctgaccgtgaccggtgagtgggacccgatgggcatgcgcgggacggtatcgcgcacgctgctgctcaaggacgtgttcgtgcccgaccatgagcagctgatgccgcgcggcgtctactaccgtgccgcgcagacctggccggcaatgttcttcacgctgtcgccgacctacctgggcgtagcccaggctgcctacgatttcaccgtgcagtacctgcgcggcgaggtgccgggccagccgccggtcaagcgccgcatgtacccgaccaagcagatcgcggtggcgcagatgcgcatccagctggaaaccatgcgctcgatcttctggcgcgtgatccatgaggccaggcccaatccgaccaaggacgagcgcctgcgcctgtacgccgcgcactacaccgtgatggaaggcgccaacgacatcgcccggctggcgatccgcacctgcggcggccagtcgatgctcaaggacctgccgcttgagcggctctaccgcgactcgcgctgcggtgcgctgatgctgccctggaccgccgagctgatcctggaccgcatggggcgcgagaccctgtacgaatccggcgagcgcgacgaatgagcgccgccagccgcgccatgcgcgcgggcgccgccgggctgggcgcgctgccggccatgctgcatggccatgccgccgcggcgccggggcggccggcgttgcactacctgggccgcaccttcacctacggcaagctgtggcggcgcgtcgagcgtgccagcgcccacctggcagcgacgtggggcatccgcgcgggcgaccgcgtcggcacgctgtgcctgaaccacgagttgcagctggtgctgctgttcgcctgtgcgcgtgtcggggcgatgttcgtgccgctgaactaccggctggcgccggcggagctgcgtaccattgccggccacgcgcaactggccgcgctgttccatgacgagcgccatgcagggctggcgcaggaggctggcagcggctgccaggtcgcgcatctcgaccggctgatcgaccatcccgcgccgttcggcgtggcccatgcgccggtgccggacgatgcgccgctgctgctggcctacacctccggcaccaccggcaagcccaagggcgcggtgcatacgcaggccgggttgctggccaatgcgcgcgccagctggtgggcgcacggcatgaccgcggacgaccacgtgctgtcggtgctgccgatgttccatgtcggcgggctgtgcatccagacgctgccggcgctgctggccggggcgcaggtcacgctgcacgaccgctttgcgccggacgcctggctcggcgcggtcgcgcaggcgcggccgagcctgtcgctgatggtgccggccacgctgcgcgcggtgcttgagcatcccggctggcccggggccgacctgtcggcgctgcgcggcgtgatggcaggttcgtcgaccatcccgctgtcgtatatcgaggccttccatgcgcgcggggtgccgctggggcaggtctatggcgcgaccgagaccggtccggtgtcggtggtgctgaagctgcaggatgcgatggcccggcctggctatgccggctggccgcagccggaggcgcaagtccggctggccggtccggacggtgccgaggtggcgccgggcgaggttggcgagctgtgggtgcgcggcgccaacgtgatggctggctactggaaccagcctgataacggcctgcccgacggctggttccattccggcgacctcgcgcaccgcgatgccggcggctgcatcgaagtcgtcggccgcagcaaggacatgatcatctcgggtggcgagaacatctatcccgccgagatcgagaacgtgctggccggcctgcccggcgtgcaggagtgcgcggtggtcggcgtggccgatgcgcgctggggcgaggtgccggtggcggtgatcgtgcccgcgccgggcgcgccgcgcgacgcgctgggcgcggagccgctgcgcgaactgctggccacgcgcattgcccgcttcaagttgccgcgcgaggtggtgctgctggaggacctgccgcgcagcgcgctgggcaaggtgctcaagccgcaactgcgcgcgatgctggaggcgcagcgccagcctggctgaatctgctgcaagggcgccaatctgcgcttatgcttgaggccgtgacaccacagacgacaacgcaagggggcggcgcaaatggaacatggacttgaaacggccacgctggggggcgggtgcttctggtgcctggaagcggtctaccagcaggtcgatggcgtggtggcggtggagtccggttataccggcgggcacgtggatcacccgacttaccagcaggtttgcgagggggataccgggcacgtcgaggtggtccgtgtcaccttcgatccgtcggtgatcaactatcgccagatcctggaaatcttcttcgccatccatgacccgaccacgccggaccggcagggcaacgacgtggggccgcagtaccggtcggcgatctttacgcattcggaggcgcaacgggccacggcggaatacgtgatgcgggagttggctgccgccaaggtctttgatgcgccgatcgtgacgcaggtcgagccggagcaaccgtactggcgcgccgaggcaagtcaccagaactactaccaggatcatccgagccaggggtactgtgcctttgtgatctcgccgaaactggccaagtttcgaaagcagtttgggggcaagttgaggaagtagggaccgggcgctgggtcggcgccaaaagccgaccctagtttccctgcgcaaacatcgcgtaaccgaccacggccgcggtttgcggatcgtccgcgaggtagtcgaggtaatccgaatagtccaggcaggcttcgttgccggtattgatgaactggtggaagcccacgtccatctgccttcctgtggcgtagacgatggcgcagacgttgccgctctgggtcagcaggctcacggcacccgggccgtcctgcggcgggaacgcgcggaacgtggtggcaaatgcggtgatggcgcgcgtggtcaggttggccagccccatgcagttgggtccggcgattgccatgccgctctcgcgggcgaaggccgcaagtgcggcctggcgcccggcaccagcttcaccggcctcggcaaagcccgaggcgtagacgatggcggcacggacgccgcgggcatggcagcgctgcaactgcggcagcacctcgtccgcgccgagctccagcaccgccacgtcaggcacctgcggcacggattcgatatcgggatagcacgccaggccggcgatctcggcatagcgcggattgaccggatacacctgaccctggtatccaaggcgctgcaggtggtccagcgccacgccgccgatgcggctggtatcgcgcgaggcgccgacaatggctatcgaggcaggatcaagcagctgcggcagggcggcgcggcccggtgtgcgcgccgtagtggaaaggggcatcgtcgtctccatccttcctcggttggaaggtgccccgattcaagccgatcgcgtgggtggggacaagcgcatggcctccagctgtgcatattatgcacaagtgttcaggcggtgatggccgttgcctgcgggagcggcctatcggccactgtgcactgccggcaagcgattcaccgcgccagcctcgcaatgatcgactcggccagccgcacgcaactcagcggcgcgcagccctcggcgttgttgctgacaatgacgatggcaggctgccccgcgcgcagcgtgcgtaccaccacatcggcaatggcatggcgggtgtcggggtcgtcgtcgacgatgcggtcgaagggtgcgtacagcttttccgcgtaggcgtagggccggcccccatgcagcatccagcgcagcaccagcgggcctggcgcttcctcgtccatcagcgcctgcgccgcggcctggcgcggcaccggcggcaggcggtcgcgtgccgacaggcagaagcgcaccccgtggcggcgcaacagccggatatagcgtggcgtcagcagtgctgggtcgcgcagctctaccgtgtagcacgcatgcggggtgatcgacggatcgagtgccggcagcgcgcccaggaaggcatcgagccgctccaggaacacggcgctgtcggccagcggacccatcggcgacagctggaacagcagcggcccgcatttgctgcccagcccgctggtggcgggcacgatgaagtcgcgcaccgcgatctcggcatcgaggaaggcagcgttggccagccggccggcgccgtcggagccgcgcagccaggcatcgcagacgctggcgggcgccttgaccaggaagcggaagccgtcggggacctgcgcggcataggacaggtagtccgccagcgggatcggcccgtagaagccgcggtcgatgccggcggcacgcagcagcggatggcgcgaatatgcggccaggcccttgcgtgacagcaggctgtcgccgtactcgccgtcatagaccagcccgttccagccggggtaggcccaggaggatgtgccgaagtacaggttcgatggcagctgcgcggcgagcgcgcacagggtttcgtccgcctgtgcgggttgcacgctcttgccacgcgcaggtttgccggagggggcggcgggcggctccgcaggggcaggtggggcgggctggagcagcccgccaaagaggtcttcagtcaatcgccggcgttgccttcagtcgttgcggccaatgggttggtcgtagatatagcggcgcgaccacggcagggtatcggccggcagcccggccttgtggcagagcacctggtagatcgacatcttctcggtctcgaaggcatgtgcgcagccggccaggtagacccgccagatgcggtatttcttctcgccgaccaggctgcggatggtgtcgccgcgggcctcgaagttgtcggcccagtagtgcagcgtctgcgcgtagtggcggcgcagcagttcgacgtcgaaggcttccaggccgccttgctgcagcgtgcgcagcaccagcccgatatgcggcagctcgccctgcgggaacacatagcggtccatgaactcggcgccgtccatcggcgtcgcgccgttgtcggggtcgggcgaggtgatgccgtggttcatcacatagccgtcgtcggccagcagttcgcggatgcggctgaagtagccgggcaggttgtccttgcccacatgctcgaacatgccgacgctggtgatgcggtcgaaggtgccggcggtgtcgcggtagtcctgcagccggatctcgatgcggtcggacaggcccgcggccctgacacgttcggtggccaggtcgaactggttttgcgacagcgtgatgcccacgcagcgcgcaccgaacttctgcgcggcgcgcagcaccagcgcgccccagccgcagccgatgtccagcagcgtctggtcaggctgcagccggatcttggtcaggatgtggtcgatcttcttgatttgcgccgtggccaggtcttcgtcgccgtgctcgaagtaggcgcaggagtagaccatgttgggatcgagccagagctggtagaagtcgttggagacgtcgtagtggtactggatcgagttcttgtcttcctgcttggtatgcgcgaagtgctgcgccgccttgaacagcgcgccgccggcgcggtgcgtggccgcggccgagaagccgtaggcgaccttgatgatgtccgtcagcctgccctcgaagtcgattttctcctgcacatacgcttcgcccaggttgtccaggctcggcgtcagcagcagcggcagggccgcggcttcgcgtacggtcagcgtgacagccggcttgtcgaagtgcccgagcgggtattcgatgccattccacagccgcaagctgaccggcagattggcattctctcgcaggtcggcgatccagttgtcgagttgcttttccagggcttgcttgaaaaacatgcgctttacctcccgatggttgcggcacacgctgcggccgacgcatcaggcaaggttggtactgagctggaaccttgcccaatccgtatcgagcgctgcaagaaaagagtaaccaagcgacgccggtctcactttagtccaattccgcagcttgtgcagcgcaccgcccagaagaccccactaccgacccgttcggcgtagttggcgcatgttcaggcgcgtgccaaccgtttcagggcgacagccgcacgatctgccagtcgccgccgggttgcaggcggaaggcaatgcggtcgtgcagccgcgacgggcggccctgccagaactccagcgcggtcggcaccaggcggtagccgccccagtgcggcgggcgcggcgggttttcgccgaacttgctgcggtattcctgctcgcgctgctccagcacgtcgcggccgggcacctcgcggctttgcgcagaggcccaggcgcccacgcgcgagcccagcgggcgcgtggcgaaataggcgtcgctctcgtcgtccgagactttctcgacgcgcccttcgacgcgtacctggcgctccagctgcacccagtggaacagcagcgccgcgcgcgggtttgccgccaggtccaggcccttgcggctttcatagttggtgaagaaggtgaagccgcggtcgtcgatgcccttgagcagcacgatgcgcgcggacggctggccgtcggcgtcgaccgtggccagggtcatggcattgggttcgggcagcttggccgtgaccgcctcgtcgaaccagcgtttgaactggctcatcgggtcgggcgctacgtcggtttcggacagagagcccagcacatagctacggcgaaggtcggcaagttgagtcatgtcgcaatcatcaggatatcggtcgggatgcgcggtgcgcccgggggcgggggccgcaggtccggctgattcgagtatagcgaatgcatcggggatcgcatttgcgtggcgacaaacgtatcggcagcgccacctgccgcggcggctaaaccggcggtggcagcgccttgcgcccctggcgccgcgagtagtagccggccgcgcccatcgcgcccgccatcgacaggaagatcggcagcatgcccagcgccgtgccgaccacgccaaacgtgagcggccacaccacctggctggtattgagcaccgccgagcgcaggcccagtgcctcgccggcgcggccgtgcggcgacgccgtgtgcaggatattcatgacattgggctgggcgctgcccagcgccaggcccagcacgaaggccagcccgcacatcagccagaactgcgtgaccagggggtaggccaggtaggccagcgctcccaccagcagcgcgctgcggatgattttccactccgagagccggcgcgacaccgccggcatggccacgcggatggcaaaggtggcaatcgcgaaagcgcccagcacccagccgatcgacgacggcgacaggccgatgcgcgagccctggatcgggatcaggaaggcgtgcaggtcccatgcggcggacagcaccgcgctggcgataaagaccgcgcgcagctcggcatgctgcagcaggtccagcgtggagtggcggctgccgtcctcgatggcgatgcgcccggcattgccgccttgcgccggcaggcgcggacgcagccattgcaggccggcctggccgaccagcgccaccgccaccagcaccatgaaggcgggacggaagcccgcatgctcgataacgtagcccatcgccaccggcccgagcgtgccggacaccgacagccccagcgcatgccaggtgtagttgcgcagccgggtctcgttggtggagacctggccgatcagcagctgcatcgccacctggaccagcatgaagcccacgccgatcagcgcgcatgacaggtacagcgcgccgaggtcgtgccagagcgccggcagcagcgtgcccgccaccaccatcagcgagcccgcggtcatcggcttgcgcggcccgatctcgtcgatgcgcttgccggcgcggattgccagcagcattggcagcaccgcatacagcgacatcagcacgccgagtgtgatggtggaggctttgagggaaatcgcgaacagcgacaccaccacgcggctggcattgaaggccacgtggttgcacaccgtcagcgcgatcagccaggtgatcggcgggacggcggcgtgcggcagcgacatgggaacgggggctcgcggtggccgcgctcgtggcggccggcggccgtgccgaggcgggaaaataaagaggaaacaaagggcggccgcagccgcgccttcagaaggatgcagcgggcgaacccgcaccgcacccgatgcttgccatgcttaaacttcttgtaaatggccgtttaattatgcgcccggcgtgggcgcggcacaacggctgcgtgcggcaggatgtcgcagcggggcaaagtgttgcgattttgcttcagacaagggcggacatgtggccgccaggcgacgcgccatggtttgcacgcgcctcaaccgcccttgtacaggggatcgttgtccgggcgcgccggtgccggcgccggcttgcgctcctcgcgctcgctggcgcgtgccggctggcgggtctgggcgtcagcctgcgcggcggtccccggcgtttccttcgggatcggcctgccggcggtcatgccggcggtcttgccggtcctgggatccttgtaggtcttgcccggcggcggcgcgaccgggcgtttgcgcaggtcggccagcagcgttgcgcacaggttgtcttcgccgtccggggacaggtccaccagcggcagcaccgcagtcgccaccggtgccagcagcgccagcgacagcgcgccgccggcgcgcagcgccagcaccccgatatcggggctgacggacggcttcttcatggtgccgcccacgtacagtggcgagcgcagcgagaacacgcgcaggcccttggagtccgggtggatggtcagcgccagcctttcattgcgcaggtcgatgccgccggtggtttcgaccaccgcatcttccgtatccagcacaaaggtgcgcgcccgcgcgatgccgtcggtgaaggcaaagtcgctgacgccgcagttgatccgcaccggcctgtcgccgaacagcttgcggatcaccacgctgcccacgttcagccccatcgcctcaagcaggaacttgctgaccgtgccgttctcgaccagcagcttggcttcgccgttggaagacgccatcagtgccgccactgaattgccggtggccgagagcttcgcgctgccgttgagttcgccgatgctggtgcgcatcaggtcaaaggtggggaacagctgcttgagcttcatgtgccgcgcggtcatgtcgaccgtggcccccatcggctcgcgcttgccgtccaggcgcatggtcgacaccaggttgccgccggccacgccgaaattcagcgggtccagcagcagcacgccgtcctgcagcttcaggtgcgtgaccaggtcggtgatcggcaggtcggcatcgcggatgatgcgcttgccggcaaagcgcacgtcggcgtcgatctcgtcccagcgctcggtgcggaatggcgccaccggcagcgccttgtcggccggctgggccaccgggctgtccttggcggggcgtccgggcttggcatcggcgccgatcaacggcgccaggtcgacaaagcgcagctggttggacaccaggttgccggccagcagcgggcgcggctcgcgcttggtaaaggtcagcgtgccggacaggtcgctgccgccgacgcggccggtgaacttctggtactcgtagatcgagccctgcttgcgcagcgtcgccatcagccggccgcgggtctggtacgggggcgtggacggcagcaccacgccggtcagcgcatagagcctggccatgctgtcgccgctcagggtcaggtgcacgtccagcgcggccaggtgggccgggttggtcacggtgccttcgatcacggcgcgggtggtgccaacccgcacatcggccaggatcgggaagggcacgtcggcgttgcgcaggctcagcaccgtgccggccttgccgctggcgttgatggtggcctcgttgtagcggccggtggctttccagcgcacgccgtagcggtcgtcggggcccttggccgtggccggcggggcggaaacgcccggcgccgaagccgctggcgcggaggctgccctggccgcgccgggtgcactggccgggggccctggcggcaccgcggaggcctcgggcgcgaccagcgcgccgtcgcgggccttgtcatagagcgggctgccgccgatggtgtcgagctctgcctgcagctcgatcttcttgagctggtcggccagcgccaggttgccgcgcgccagcaccacctcgccgatatgcagctcccattcggacgggcccttcttggggccgaactcgagggtccagttgttgcgggcgtccggcaggcgctccagccacaccgccgggctgtcgacgacaatggtcggcaccgcgatctggtgcgccagcagcggtatcggacgcagcacgaagatcagctcgcgcacggttgccaggttgggctgtttggcccagtcggtattggcgatggtgatgtcgcgcgccgacagccgcggccacggcaccagcgtatgccagcctttctcgccctcaccgcggcgccaggtcacgctcaggtcgccgttgatggcaaaggggcggccgatggcctcggtgacgcggtcattgagccagggcttgaggcggttccagtcgaaggtcaggatcacgaccaccagcagcgcgatcagcgcgatgggtgtcagcacactccacagaacaaccttgcggcgcacgggcatgaggcgggctctcctgtctggcgggggggcagggccggggccgcccaagccagcgcggggcggcgaacggaccactgcacgtctattgtatagttgcgcgcttcctgtctttgtcggggattggctgacatcgccgccggaaaatgccggattcttgccccgcgcagccaagcgccgaccctgccgcactccatcgacccgatacctccagcatgaacgatgccgcacacgacctggccggcctgcccgagccgctgacccacgaaagcccggccgaggatgactaccaccgccgcttcggcggcgtggcaaggctctacggcgccgccggcctggcccgcctggaggcggccagcgtgtgcgtggtcggcattggcggcgtcggcagctgggcggccgaggcactggcgcgcaatgcggtcgggtgcatcacgctgatcgacctggaccatatcgcgctgtccaacaccaaccgccagatccatgcgctgggcgatgcctacgggcgcgccaaggtcgaggccatggccgagcgcatcgtggccatcaacccgcgctgccgggtaacgcaggtcgatgatttcgtcacgccggacaacgtgcccgagctgctcggagccggctatgactacgtcatcgacgccatcgacgcggtgcgcgtcaagactgggatgctcggctgggcccggcgccagggcgtgccggtgatcacctgcggcggcgcgggcggccagctcgaccccacgcgcgtgcgcatcgacgacctggcgcgtacgatccaggacccgctgctgtccaaggtgcgcgccggcctgcgcaagcaatggggctttacgcgcgacccgaagaagaagttcggcatcgccgcggtctattcggacgagccgctgcaatatcccgagcccgagcagcaggcctgcgagatcgacgaggcgccgccgctggacctgcagccgggccagccggccatgcgcggcccgcaggggctggcctgcgcgggctttggctcgtcggtggcggtgacggcggtgttcggctttgtcgcggcgtcggcggtgatcggcgcgatcgcgcgcggctgaagccgcccgggccgctcaggcgctcagcgcgcgcagcagcccgtcgatctcggcgtcgccgggtgcaaggttgtcgaagaagatcagctccggataatccgcgggcgccggcatgaagcgccgggtgcggtaggcttcccagtggcccagcttgtaggcgtcgttgggattgccgcgccggatgatgcgcgcatgggcctcgtcttcaggcagatggacccagaccgtgcgcaccgtcgtgccggcgggcacgtgcagccagccggggtcatgcagcaggtgggccttgacctcgcgcgacagcgggccgatcacgatcacgctgatgcccagcgccaggttctcgcgcgcggtgtcgagcaggccctggtattccgggtcgcgcaggttgttcaggtaggccgggctgtcgcggtcattggggtcgccggtgatcgcggccatggccgcggcgctgtagcggccgtacagggtgtctttgtcgagcaggcagaagggctcgccggtggcctgcatcagcgggccgatcaggcggtgggcgagggtggtcttgccggtgccggcatggccgcagaagaagatcagtcttggcatgagggtttggtgtagcggacagggcgcatcgcccacagcataccccctgggcttgcgccagatcaggcccgggccgcgccgattcggtatccttgccgttttctcccacgattgccgtcgatccatggacgccaaagaccagctttcctccgccggcctgccggaccacctccatctgggcgaaccggtcaccgacgccacccatgccgagttcgtgcagctgctggccgcggtggccggcgccgacgacgccggcttcctggcggcgatggacgaatggatcgaccatacccgccatcatttcgcacaggaagagcagtggatggaggcgatgggcttcggcccgcgccattgccacgcgggcgagcaccagcaggtgctggccgtggccgccgcggtgcgcgacaaggtgcacaccgatgccgagttccagcttggccgccgcctggtggccgagctctcgggctggttcgaccatcacgtcaagtcgatggacgcgatgatggtggaacatatgcgcgagcacggcttcacgctggtcgaaggcccggtcacggcggcctgagcgcagtcaggccgggtgggcggcggcgcggtcgatcaccacgaaatacttgcgcaccggcgccagcacctcgaacagcccggtaaagccggccgggatcacgcaggcgtcgccggggccgaaatcgctggcctggccggcatcgtcgctgatgcggatccggccgctgatgacatggaagaactcttccttgccggccggaaaggcgatgcgccatgccccgggctcgcatgcccagatgccgcagtcgaaatcgccgtgctgcgcgctgtagtgcgtccaggtggtgcggtcggggttgcctgacaccagccggtccgggcgcgggcggtcgtggctgggggcgggctcggtcttgaagtcgatcaggcggggcgctggcatggcggatggcaggaaaaatggcggaactgagtccgccagtttaccgcgccggggcccgcggcccggccgttcagttcagcgccgtgctcagctggcggcgccagtgcgacaccacgtcgggccggtcggccagcatctcgaacaccgacagcatggtcttgcggccgatatcgtcctcgaaagtgcgatcggtgcgcacgatttccagcaactgctccagcgccggctcgtactgctggcgcgcgatcagcagcctggccaggtcccgccgcgccgccaggtcgcgcgggtcggcggcaatgcgcgcgctcagggtgggctcgtccggcaggccggacaggccctccatcgcatccatgcgcatgcgcagcgcggcatgggcgtcctgctgcgcggcctgcggcgacagggcctcgaactgcgacctggcctcggcgatggcattgccgtccagcaggaaaccgatataggccagccgggcggcgtcggtctcggggtcgagcgcaatggcttcgtcgaacttcgcctcggcgccggcccggtcgccctcggcggccagttgcagcgcgtcatgcagggccgtctgcgcgggcctgggcatcagccgcccgaggaattcacgcaggccggactcgggcagcacgccgatgaactggtccaccgcctggccgtcggcaatcgccaccacatgcgggatgctgcgcacgccgaagtgcgcggccaggtcctggttctcgtcgacattgaccttgaccagcttccactggccgccggcctcggattccagccgttccagcatcgggcccagcgtgcggcaggggccgcaccacggcgcccagaagtcgaccagcacgggcgcctggcgcgaggcctcgatcacttcggtttcgaaattctgcagggtcacgtcgctcatgggaaatcctggatcggggagaggcgggagcggccagcccgggcgggccgcccgaaggggcaaggcaatctatacccctattgtgagggcgaaggcgccgaatgcaacgccttgtgccaataccgtgcccgcagggttcgggaaagtctgcggttgaaaatagaacgatcgttcggttatagtccttgatcataccaaaagccccggtccgcgagaccgcacaggagaccttgcatgcagaccccagctcgcccgcatttccagttctggccgaagcgcctgccgaccgccatcgtgctgccggagacctcgctctgggccaacctggaagtctcggcgctccgctatgccgacaaggccgcgatccgctacttcggcaatgccatcaccttccgtgagctggaggcgcaggccaccgccctggccggctggctgcagcagaaggcgggcgtgaagaagggcgaccgggtgctgctgtacatgcagaactgcccgcagttcatcgtcagctactacgccatcctgcgcgccgacgcggtggtggtgccggtcaacccgatgaaccgtgccgaggaattcaagcattacgtgaccgacgcgcaggcgcgcgtggcgatcttcaccgccgacctggccgccggggtcgagcaggcgcaggcggaactggcgccggccgagcgcctggagcatatgctggtgacccagtatgccgacgcgctgccgcccacgcacgaacatccggaagacgcgccgccggcctggctgaccacgccgcatccgctgcccgcgggcgccaccgcgtggcccgaggtactgggtgccggcctgcagcctggcccgcacaccgccggcccggacgacatggcggtgatgccctacacctcgggcaccaccggcttccccaagggctgcatccatacgcaccgctcggtgatgcacaacatcgtcggcggctcaacctggtcgggctcgggcgccgaatcggtgatcctgtcggtgctgccgctgttccacgtcaccggcatgcagtacggcatgaacggcccgatctacagcggcgccaccgtggtgatgctgccgcgctgggaccgcgaggtggccggccgcctgatctcgcgctaccaggtcacgcactggaccaatatcccgaccatggtgatcgacttcctggccagccccaacctggcccagttcgacctggccagcctgcgctatatcggcggcggcggcgcggccatgccgcaggccgtggccgagcgcctgcgcgagcagttcgggctgaactacctggaaggctacggcctgtccgagaccatggcgccgacgcacagcaacccgtcggaccggcccaagctgcagtgcctgggcgtgccgaccttcaacaccgacgcgcgcgtggtcgacccggtcacgctcaaggaactgccgcccaacgagatcggcgagatcatcgtcagcggcccgcaggtgttcaagggctactggggcaaggaagacgccacccgcgacgcctttatcgagttcgagggcaaggccttcttccgcaccggcgacctgggccgcatggacgaagagggctacttcttcatcaccgaccgcctcaagcgcatgatcaatgcgtcgggcttcaaggtgtggccggccgaggtggagaacctgctgtacaagcatccggacgtgcaggaggcctgcatcatcggcacgcgcgacccgtaccgcggcgagaccgtcaaggcggtggtggtgctgcgcgcccatgccaaaggcaagaccacgccggagcagatcatcgaatgggccaaggagaacatggccgcctacaagtacccgcgcgtggtggagttcgttgaggcgctgccgaagtcgggcaccggcaaggtgatgtggcgccatctgcaggaatgcgagaatgcgcgcaacaccggcgcagaggagaggcccgcggcctgaggcagccgggtagccatatgaaaaaggctggtcgaccgaccagctttttttatttacgcggtgccggccctcaatgcccccgcacccgcatcagcatcttcaccatcgtcttgtagccccgctcgcgcgcatggcgcgtggggctcacgccttcgcggtcggcgaggttggcgtcagcgccggcatccagcagcagttgcaccgtttcctcgtagcgggtgctgccatcgcccaggatcaccgcttccagcagcgcggtccagccgaggtcgttgacatggtccacggcaacgccggccttcagcagcagcttcaccacctcgacatggccgtgctggctggcggcgatcagcgcggtgccgtcatagcggtcggtgctggccaggtcggcgccgtgcgccagcgccaggcgcaccatgtcggcctggccggtggcggctgccagcaggaaggggctgttggcctcggtgtccttcaggttcacatcggcgccggccagcagcagcgtgcgcgcgacttcggtgtgccggttctgcaccgccgccagcagggcgctgcgcccgcgctcgtcggccgcgcgcgccgaggcgccggcggccagcaggcgcgccaccaggtcctggtcgccggcgctggcggcggtgatcaggttgcggtcgagcgtgccgatggcgtcgcggcgtggcggcggctgcatggccgcgctgcgcggcgctcgggcggcgggctggctggccgcgccgccggcgggccgtgccgccagggtttgcccgccctgggccgccagcaggccaccccccatcagcaatcccatcaggcccagcagctcgttgagtgcctgtctgcgggtgagggcggcggggcgcgtcatggcggcagctccttggctcagacggtttcgtgggggctggccggcaggggcgctgcgtcgtcgcgggcggcgtgcgcagcgcgctcggcgtcggcggcatcgttggcctgcagctggcgccagagcctgcccaagtagggatcgtcgacgccgttggtggccaggcccagcaaggtctgctgcaggtattcgcgcgcggggccgtacagtccggcagcgtggcgcaggcgctcgaccacgctgggatccggcagccggccggcgtaggcctcgtgcgagcggttcatgacgaaggcgagggcacgctgctcaggcgcgctggcatccccggtgcggatgcgcagccagcgcggatggtaggccccggtcagcatctcgcggcgccacagcacgcggaattcctgctcgaccacatggctggggatgcggaacaccatgccgtggcagcagccgccccggtccaggcccagtaccaggcccgggttgtcccaggtgccccggttgatgcgggaatagaggtagaagccgcggtggtagccgtgcacggtggcgcgctggcgctcggtgtgcaccaccatcgggttccagatcagcgaaccatagccgaacagccagacatcgccgccaagcgcgggatcttccgggcggcgcgccagcgtgtcggaaagggactgctcgagcacggcttccggcagcagcgaggacgcgaccggagtactgcacagcgaggtgcgcagacggtcggattcgaggtcctgtcgcgtgatggccatggtggaagcataaatcaaagcggcgccacgggaaggtgggggaaatgacataagtgccagtttttctcagaattgcctgagcaaccggcacgggtgtgggcgcctgacaacgtttggcgtggcgtgccgcctctgtcactcgccgcggacgggtgctgccgcacctttgtccgcgatcaggtgcacgtgaattgctggccggcgcggctgccatgtccttacaatggtggcctcaattcacagggggaacccgcgatggcacgcacgcttacggtggtgttcggcagtggcaaggaatatgacttcacgatcggcacggacgagctggccgcggtcaccgaggacgccgcgtggcgctggttcgaccgggaatacagcgagctgggctgtcaggcgtcgagcccggtcggcaaggtgctggtgatcgacaagatcctgaatgtcgccaagttttccggagaggcgcgcttctccggcgatcctgcctgggcgcaggactatgcccgccatgcggcgcggctgctggaccgggacaaggtccgcgtcgatgtcggcaacgccgcgatcgggttctgaggcgcgggcgcgccagcaagacgggtagttgccgcggttgtcgcccctgcctgtgcaggcgcgacaaccttgctgccggcttagaccgccagcagttccacttcaaacagcagggtagcgttcggcgggatcacgccgccggcgccgcgggcaccgtagccgaggtcggccgggatcaccagccggcgcacgccgcccaccttcatgccctgcacgccttcgtcccagccgcggatcacatggccggcacccagcgggaacacgaacgggtcgttgcggtccttgctcgaatcgaacttgcggccagcctggccgttctcgtacagccagccggtgtagtgcacggtgacgtgcttgccggcggtggcttcggcgccggcgccgacggtggtgtcttcgtattgcaggccagagggcgtggtttgcatggcgtatttccttccgatgggaacagacgtggtgagaggagaacgcagcgcggctgcgttcaggcttgggcgcgctggagcacatccagcgtcagttgcacattgcggtcgtcgtcggccacccagatgtcgccgtcctggatcgtcaccgacaggcgcatggcgcgctgcgccagcgcagccagggcttcgaccgcttccgccgggacattgtagacggtgacgttgcgcagcttgccggccttgcccgccatgcccttccaccattcgcgcgcgctggcggcgttgtaggtatagacggtcacgcgctcggcgcgcgccgcggcgcgcttcaggcgcgcttcgtcgggctggcccagttcgacccagtgggcgatgtcgccggtcaggcgcttgtcccacaggtcgggttcgtcgggttcgtccaggccgcgcgtgaaggccagcgtttcggtggcttcgcaggcaaaggccagcaggcgcaccatcatgcgcgcgtcattctcggacgggtgctgggcgatggtcaggctgtggctgccgtagtagggccggtccatgtcggagaccgacaggtcagctttgaagatggtggatttgagcgccatgaggtgaagtgagcggcaggcgccccggctggggtgcgggagacgcaaaaggccgcatcatacgccatttgccggacaccgcctgcgggcccggcatactcgcgcagtggctcagcgcttgcggtattccttgaggtagaagcgcagcagcgccgacagcagcagcgtgctcaggaagccggcggcaacgatcagcgcctgcccggcggtggagtcgatctggccggccaccccgaggcggaacagccaggtgccgaccatcatcgccaggaacggcatcagcagcgcgccgcggccgtaggtttgcactgcccacagcgggaagcggcgcaggaagtcgcccggaatgctgcaggccaggcaggcaccggcagctgccagtgcggcggccacgatgtcgccggaatggatgtcgaacatggtcttggtctcgcgcgcccccatcaggcacacgcaggcgagcgtggcgggaattgggcaaagcgctgattctacaagagaaatttgcgccggaggtgacgaatacggttaccgtggggtgctgcccgcgggcgatgcctcgaccgccacttgcagcgtcacggtgtcgcctacctcgggcaggaagcgggtcatgccaaaggcactgcgcggcacctcggcgcggaagtcaccgccgcagacctgccggctcacgccgaacagggtgacctcgccgcagcggaaacgttcggcctgcaggcgcagcggctgcgtgacgccgtgcagcgtcagctcgccttccaccgccgccagccggccgccttccatcaggaagcggtccgcgcgcagccgcgccaccgggtgctgggcagtatcgaagaattgtgccgagcgcagcacgccgtccagggtgcggttgccggtatcgaccgaggccaggtccacggtcacgtcgagtgcgccggcgccgctgtccgcgtcatagaccaggcgcccgtcgatcttgccaaagcgcccgcgcaccgaactgcgctcgaaatggctggcggaaaaatagacggtggtgtgcgccggatcgatggtgtactcaagcggcgccgcctgcgcagcggtgatgcccagggcggcagcgagtgccagcgcgcgtgcggccatggctcagtcggcgttcagtggacgaacacgggcagcaggaacatgcccaccaccgacaggtagccgatggtccagcacagcgtgcgcagcgtggcgcggtcggtcacgtagcacacggtgtagagcaggcgggccacgatgaagaccacggccagctcgtcgatgcgggcctgcggcgcctgcaggtggctggcggccagcacggcggcggcaaagaaggggaaggcctcgaagtggttgcggtgcgccatgtcggcgcggcgcgcgcggccggactgctgctccagccagccgcgcgggtcatggttgtcatagccaggcccgctggccttggcgatggccaccgtcgccagcggcaggatgccggccagcagcacgcaccagaaagcgatcggcataatccagtcctttcggttgcaatgccggcgccgccgtcactggcgccgccggcccggcccgagcggtcaggcggcgaccacgcggatctcgatgcccgccaggcccaccacctgcccggcgcggatcttggcagtcttgcgcgattcaggcgcgccgtccaccgagacttcgccggtggcgaccagcgccttgccggcgccgccgctgtcgcacacgcccgccagcttgagcaggtcattgagcgcgatgaactcgccctcgagcgggaaggtgatggtttgcacggctgccttgccaggtttggccatcacttgccccagctgtctttcagaccgacgatgcggttgaagaccggcttgcccggctgcgaatcggtgcggtcggcgacgaagtagccatggcgctcgaactggaagcggtcttcgggctgcgcctcgcgcaggcccggctccaggtaggcggtgatcacctgcttggaatccgggttgagcgcatccaggaagttcttgccgccggcatccgggttggggtcgttgaacaggcggtcgtacaggcgcacttcggcctcgtacgcgtgcgccgcgctgacccagtggatcacgcccttgaccttgacgctgtcggcgcccggcgtgccgctcttggtttcgggcaggtagctggcgtgcacggcgatcacgttgccgtcggcatccttgtccacgccggtgcactcgatcacgtagccgtatttcagccgcaccttgttgcccgggaacaggcggaagtagcccttaggcggagtctcgttgaagtcctcgcgctcgatccacagctcgcgcgacagcggaaagacgcgcttgccgagttccggcttcttcgggtggaccggtgccgagcattcctcgctctggccctcggggtagttgtcgatgatcagcttgagcgggtccagcacggccacgccgcgcgcggcacggccgtccaggtcgtcgcgcaccgcgccttcgagggtgctcatgtcgatccagctgtcggccttggccacgcccacgcggtcgcagaacagctggatcgattccggggtgtagccgcgccggcgcacgcccaccagcgtgggcatgcgcggatcgtcccagccgtccacgcgctgctcgtcgaccagctgcttgagcttgcgcttgctggtgatggcgtaggtcaggttcagccgcgcgaactcatactggtgcggcagcgggtcgcgaaacacgccgctatcgcgcaggtgctcaagcacccagtcgtacagcgggcggttgttctcgaactccagcgtgcacagcgaatgcgtgatgttctcgagcgcgtccgagatgcagtgggtgaagtcgtacatcgggtagatgcaccacttgtcgcccgtgcggtggtgatgcgcatggcggatgcggtagagcaccgggtcgcgcatcacgatattgggcgcggtcatgtcgatcttcgcgcgcagcacgtgctcgccgtcggcgtacttgccggcgcgcatgtcgcggaacagctgcaggttctcttcgacgctgcgctcgcggtagggcgagggcttgcccggctcggagaaattgccgcggctggcggcgatctgctcggcggtctggctgtcgatgtaggcggcgccgcgctcgatcagggtctcggcaaaggcgtagagctggtcgaagtagtcgctggcgtagtacaggtgcggctgtctggtgccgtccttgccctcgctgtcccaggaaaagcccagccagtgcaccgcgtcgatgatcgaatcgacgtattcggtgtcttccttgaccgggttggtgtcgtcaaagcgcaggtggcagcggccgccatagtcgcgcgccagcccgaagttcaggcagatgctcttggcgtggccgatatgcaggtagccgttgggctccggcgggaagcgggtgatgacggtcggcagcggttcgccggccttgtcctggcggccggcataggtgctggcggcgagatcctggtcgatgatgctgcgcaggaagttggaggcggcgggggtgctgtcggtaggcttgttgtcgtggctcatgatggcgccggttggccggcctgatgcgtctgggtgcttggggccgggtcgtcagattgcgtggcggaatgccaatagcgggattttaccgtgccggagccgccgcacgccgcgagccgccgcggatttccgcccttatcccggatttgcgtccgcgcggatgcgcctggctgcgacgaaagtgatgtgtcggagtagcatgggagcgtgccggcccgtggtggccggctttggtccatcgctgcaggaatgcccatgaacgcccaacccgatgcggcgccagtgccgcttgagccctctgaagtcgttgccgcgctgtggcgtgatgccggcctgcccgccgaggcgctggcgcacctgaagctggacggcgccgagccggtgctgccgtcgagctttgccgtgggcaccgccgcccaggccagccttggcgccgcggcgctggcagccgccgcactgtggcacagccgcaccggccgctggcaggacgtcagcgtcgacatgcgccacgccatcaccgaattccgcagcgaacgctacctgcgcgtcgatggtggccccgcgcccgaactgtgggacaagctggccggcatctaccgctgcggcgacggccgctgggtgcgcctgcataccaatttcccgcaccaccgcgacggcgtggtgcgcttgctcggctgcgccaatgacaaggcggccgtgcaggccgcgctggaaaagcgggacgccgaagccttcgagaccgcggcgtccgacgcgggcctggtggttgcggcattgcgcagcttcgaggaatgggaccgccatccgcaggcggccgccttgcgcggcctgccgccggtgacgctggagcgcatcggcgacgccccgccacaaccactgccggcgcccgcatccgcggatgcgcagccgctgtcgggcgtgcgcgtgctcgatttcacccgcatcatcgccggcccggtggcgggccgcacgctggccgcgcatggcgccgacgtgctgctggtcactgcctcgcacctgccgtcgatcccgccgctggtgatcgacaccggccgcggcaagcgcagctgccagctggacctgcgcgatcccgatgacaagcgcaccctgcacaagctgctgcacggtgccgacgtgatggtgcagggctaccggcccggcggcctggccgagctgggcgtggggccggaggccgcggcgcgcgcacgtccgggcatcgtctatgtgtcgctgagcgcctatggccatgtggggccgtggtcgcacaagcgcggcttcgattcgctggtgcagaccgccaccggcttcaatgatgccgaagcgcaggcggccggcagcgacatgccgcgcccgttgccggcgcaggtgctggaccacgccgcgggctacctgctggccttcggcgcgatggccgcgctgcaccggcgcgcggtggagggcggcagctggcatgtgcgggtgtcgctggcgcaggtggggcagtggctgcgcggcctggggcgcgtgccggacgggctcaaggcgcccgagcagaagatcgacgacgtttccgacctgcttgaggccgtgccgtcgggcttcggcatgctgacggtggtgcgtcatgcggcgcatctgtcggaaacgccggcgcgctggaccttgccgtccgagccgctcggcacgcacgcgccggagtggctgccgcgcggctaggttagtagagcgtggtgcgctgccgctcgggcaggtcacggtcgtaggcggcgccgtcgatggcgttgtcgctcagcgtggccaggatctcgccgttgctgggcagcgactggcgcgccacctgcgcatccgctgcccacagccgcgagcggatcagcgcgcgggcgcactggaagaacactgactgcaccgtgaccaccagcaccgtggtcggggccttgccgtcggccaagcagcgcgcgaccagcgccgggtcgacgctgatctgcgcggtgccgttgacgcggatggtctcgttgatgccggggatcacgaacagcagccccacgcgcggatcggcaacgatattgcgcaggctgtcgatgcggttgttgccgcgccggtcgggcagcagcagcgtgtgttcgtccagcacctgcacaaagcccggcgcatcgccgcgcggcgagcattcagcccggtcctcgcccaccgtcgacagcaggcagaagggcgccgcctcgataaaggcgcggtagtgcgggtgcaggtagtcgacttccttggacagcgacggggccgccggttgcgcgtagagcgcttccagttcggccagcgtggtgatggcgtgcgaggtcatggcaggcggggcgtgggtcggcgggaggcgaaaccgtcaatgtagcgcagatgccgttacacggtcacggtaccccggccgatctccagcacgcggccgcccacgcggatggtgccttcggcatcggccttcaggcgcagccggcaggggcggccaacggcctcgccctggtcgatcgcatactcggccggcagcgcgtggccggtggccagcagccagccgccgaggttggcgcaggccgaacccgtgcccgggtcctcggccacgccgccgccttgcttggtgaagaagtagcgcgacagcacgcggccgggctgctccgggtcgaaagcaaagacgtagacggtcttgcggcccaggctgctctgcggccagatctgcaggcgcgcgctgtcggggttggcgcggcgcacggcatcggtgccgcgcactgccaccagcagctggtcggcgcccgtgtcgacccacatcggcgacaccagcaggtcgtgttcccgcaggccgagcaggctggcgatgtcggcatcggacaggcccgccggcgcggtcttcggcttgccgctgtggggggcggtgaaggtccagacatcgccctgcgcggtcaccggcaccacgcccgccgcgaactccagcgtcagcgcgtcgccggttccggccaggtcgcgcacagcgtgcgcggtgcccagcgtcggatggccggcgaagcgcatttcatagcccggcgtgaagatgcgcacccgcgcgctggcacgttccgacggcaggataaaggtggtttccgacaggttgaactgcagcgccagtgcctgcatggtggcctcgtccataccgcgcgcatcctcgaacacgcatagcggattgccaccgaaggtggcttcggcaaagacgttgagcaggcggaaggcgtaggtggtcatggcgcggggggctccggaggctggttgatcaccagtgtacggagcgggggcggacacgccatgcacagttgggccgatcgccggcgggccagttgcggacagttgtgccgtgccatgaaaaacgcccgggcggacccgggcgtatcgctggcgagggcactgagtcagccggctcagaaccccactgcctggccatcgcgccggctgtcgctggccgcgacatagccgtgctcggcgtcctccgacaggcgccagatgaactggcccgagccgaagtccatgtacggatcgtccaccgacttgagctggtggccgcgcgccttcaggcccgcgaccgtggccgggtccatggtgctttccacatccagcgtgaagtcgcggttgaccttccagcgcggcgcgcagcacgcggcctgtggctgctggttgtaatccagcatgcgcaccacggtctgcaggtggccctgcggctgcatgtcgccgcccatcacgccgaagctcatcaccggctggccgtccctggtcaggaaggccgggatgattgtgtggaacggacgcttgccgcccgcgaccacgttggccgacttcgggtccatcgagaagcccacgccgcggttctgcaggctgatgccggtgcccggcaccaccacgcccgagccgaagcccatgtagttggactggatgaacgagatcatcatgccgttctcgtcggcggcggtcaggtagatggtgccgcccaccttgggcatgccgaagtcgaaatgcgtggcgcgctgcatgtcgatcagcttcgcgcgtgacttcaggtaggcgtcatcgagcatttcctccggcgtgacttccatgctgcgcgggtcggccacgtagcggtagaggtcggcaaaggccagcttcattgcctcgatctgcaggtgctgagaatcgaccgagtccaccgggatcgaagccatgtcgaactggtccaggatgcccagcgcgatcagcgcggcgatgccctggccgttgggcgggatctcgtgcagctcgtagccgcggtaggacttgctgatcggcttgacccagtcggggcggtagttgcgcaggtcatcgagcgtcatggcgccgccgcactgctggctgaaggcggcaatctgctcggcgatctcgccttcatagtaagcgcggccacgggtcgcgccgatcttgcgcagggtttcggcggcagccttcatggtgaacttctcgcccaccgcgggtgcgcggccattgggcatgaaggtctcggcatagccgggctggtccttcagttcaggcaccgcggcggcccacttgtgtgccaccaccggcggcacggcatagccgcgctcggcgatctcgatcgccggctccatcaggtcggcgaacggcagcttgccgaagcgctcatgcagcgcggcccagccggcgaccacgccgggcacggtgaccgagtcccagccgcggatcgggcggttggccaggccgttggcatcggtgccgtacttgttcttgaagtattccgggctccacgccgccggggccacgcccgacgagttcaggccgtgcagttccttgccgtcccacaggatggcaaaggcatcgctgcccaggccgcacgacaccggctcgacgatggtgatcgcggcggccgcggcgatggcggcatcgaccgcattgccgcccttgagcagcatgcgcagtccggcttgcgcagccagcgggtgcgaggtggaaaccacgttgcgcgcaaacagcgggatgcgcacggaggggtaggggttggtccagttgaagttctgcatgcttgtctgtgtccttgtgctcggtgcgcccgtagcgcaaattctgcggcccttattctgccgtgatcttgcgatccttgatcagcttgccccagcgcgcgctgtccttcttcaccatcgcggcgaactgcgccggcgtgccgccgaccggctcggcgcccagcttgcccaggcgttccttgacctcgggcgactggatggccttgttgaactcggcattcaggcggttgacgatatccgccggcaggcccttggggccatagatgccgaaccaggtgtcggactcgaagccgggcaggcccgactcactcgcggtggggatttccggtgccagcggcgagcgcttggcgctggtcactgccagtgccttgagcttgccgtccttcacatgcggcaggcccgacacgatgctgtcgaacagcacctgcaccttgcccgagatcaggtccggcacggccagcgcggtgccgcggtaggggatgtgggtgatgaacacgcccgcctgcgccttgaaggcctcggcggtcaggtgcaccacggtgccgttgccgctggaggcgtagttcagctcgccgggatgcttcttggcgtagtcgatcagctcgcgcacgtttttcgccggcaggctgttcggcaccaccagcaggttggtggcgatcgcgacctggctgaccggggtgaagtcggtctcggtgttgtatggcaggcgggtgttgatatacggcccgatcgagtgcgtgctggtggtggcgatcagcagcgtatagccatcgggagcggccttggcggccatgtccgagccgatcgcgccgccggcgccggggcggttgtcgaccacgatctgctggcccaggttggcgcccaccttctgcgcgatggcgcgtgccagcaggtcggtcgcgccgctggccgggaagggcacgatcaggcggatcggcttgctgggataggtatcggccagtgcgggcgtggcggccaggcaaagcccgcagccaaggccgatgccgaagcggcgcagccaggatttcattcttgtctccggtgtcaggcgattggccccgattcatgagccggccttcattattccgtgctgccggtcacaaagaaagctaatatttctttccaatgtcacaaggaaatcttaaggatcagcccttgccggcatatgcctgactcttcccttctgtgcaccgatgagcactgtccgcttcctccgtaccttcgttgccgtggccgagcacggctcctttgccgccgctgccggccaggtggcgctgacccaggccgccgtcagcctgcagatgcgcgcgctggagaccgaattgcgccgcgagctgttcgaccgcaacggccgcgtggccgtgctcaatgccgacggccgcgcgctgctgccgcaggcgcggcgcatgctggcgctgtatgaagagatgcgcctgccgctggcctcggacgaagccatggcgggtgcggtggcggtgggtgcggtggtgtcggtgatgggagggctgtcacatgcggtggcgcatatgaagcgcacttatcctgcgctcgacgtgcgcctggtcggcgccaagtcgatcgagctggcggcgcaggtcgaggccggcgagctggatgccgccatcctggtcgagggcgccgcgcgcgtgcccggcacgctgcgctggacgccgctgtaccaggagccgctggtggcgatcgcggcacgcggcagcccgggccgcgacgcacgcgaggcgctcgccaccaatccctacctgcgcttcgaccgcagccagcgcaccggcgtgctggtcgagcgcgcgctgcgccgcgcgcacctgaaggtcaacgagttcctggagctgaacgcgatcgaggcgctggtggaactggtgcggcaggaggtcggcgtgaccgtggtgccgctgctgcgccgcgcgcgctggcgcgacgacgaggcgctgcgcatcctgccgctgctggtcaacggcgagccggtgatgcgtcacatcggcatgctggaacggcgcgaccacgggcgcgggaaggtgaccgcggcagtacgggcggcctgcagcgagctgttcggcgcctagctgtcgccgtgccataaccaagtcctatcgcgcggatagtcagaaacacgttctcctgaagatccctattgcatatatttcggttgcggacggccgctgacgcggcccgactcgccatgggcgccacgactcctgcgttggcgcacgccctcgcgcgtccgctgattgcccgacctttgacgccatcgctgcaggcgtgttcagtacgtccctacatggagaaacgtatgtctaacgaaacaaagtgtccgttcagccatgccgccggcggcggcacgacgaatcgtgactggtggccgaatcaactgcgtctggacctgctgagccagcattccagcaagtccaacccgttgggcggcgacttcaactatgccaaggccttcaagagtctcgacttcgcagcagtgaagaaggacctggccgcgctgatgactgactcgcaggactggtggccggcggacttcggccactacggcccgctgtttatccgcatggcctggcacagcgcgggcacataccgcattggcgatggccgcggtggtgcagggcgcggccagcagcgtttcgcaccgctcaacagctggccggacaacgccagcctggacaaggcgcgccgactgctatggccgatcaagcagaagtacggccagaagatctcctgggccgacctgatgatcctggccggcaacgtcgcgctcgagaccatgggcttcaagacgttcggcttcggcggtggccgggaagacacctgggaaccggatgcggatgtttcctggggcaaggaaaagacctggctgggcggtgacctgcgttatggcaagggtgctgccggcaaggatgaaggcgtggtcgtggccgacgaggcgttgcatggcaccgagaccagccgcaccgactccgggcgcaacctggagaacccgctggccgccgtgcagatgggcctgatctacgtgaacccggaaggccccgacggcaatccggacccgcttgccgcggcccacgacatccgcgaatcgttcgggcgcatggccatggacgacgaggagaccgtcgcgctgatcgccggcgggcatgccttcggcaagacccacggtgccggtcccgcggacaacatcgggcccgagcccgagggcgccgatctcgaacgccagggcctgggatgggcgagcacctttggcaccggcaagggcgccgacaccatcaccagcggcctggaggtgacctggagcaatacaccgacgaagtggggcaatagctatctggagaacctgtttggccacgaatgggagctgaccaagagccccgccggtgccaaccagtgggttgccaaggatgccgcggaaaccatcccgcacgcttacgatcctgcgaagaagctgcggccgacgatgctgaccacggatctgtcgctgcgtttcgacccggcctacgagaagatctcgcggcgcttcctggagcatcctgaccagctcgccgatgcctttgcccgcgcctggttcaagctgatccaccgtgacatgggcccgcgcgcccgctacctcggaccggaagtgccggccgaagagctgctctggcaggatccgatcccggcggtcgatcatccgctggtcaacgagcaggacgtcgccgcgctcaagcagaagatcctggcgtcagggctgccggtctcgcaactggtgcagaccgcctgggcctcggcatccaccttccgcggctcggacaagcgcggcggcgccaatggcgcgcgtatccgcctggccccgcagaaggactgggcagccaatgaacccgagcaactggcgaaggtgctgaaggtgctcgaagggatccaggccgagttcaacggcgcacagtccggcggcaagaagatctcgcttgccgacctgatcgtgctggccggtggcgcggggatcgagcaggcggcgcagaaggccggccatcgggtgaccgtgccgtttacgccgggccgcatggacgcctcgcaggaacagaccgacgtgcaatccgtcggggcgctcgagccgattgcagatggcttccgcaacttcctgaaggggaagtacaacatccgggcggaggacctgctgatcgacaaggcgcaattgctgaccctgactgctcccgagatgacggtgctcattggcggactgcgcgtcctgaacgtgcataccgggcaggatgcgcacggcgtcttcaccgaccgtccggaaacgctgagcaacgatttcttccgcaacctgctcgacatgcgtacggaatggaagccgctctcggaggcccgggacgtgttcgaggggcgtgacgccaagaccggtgcgaagaagtggaccggcacccgcgtcgacctggtgtttggttcgaattcccagctccgggccctttgcgaggtctacgcaagcgaggacggacaggagaagtttgtccgtgacttcgtcgccgcctgggccaaggtgatgaacctcgaccggttcgacgttgcctgaacggtcgcgtggccccgtcagggccgtcctccctgacggggctttctcaacccgggtgtgagcggcgcagtggacgcgtcgccgacacaatgacaagcggccggcaagcgccggccgcgtggcctgccagggcatgcccccgcctacatgatcctgtgcgcaaaatgcccgcgccgcgcatcggccatcaggtcgaggaactgcccggtgctcatgtgcaccagttcctggtggtcgcccgcctcgaagtagacgtcgggatgcgtcagcaggctgtcgtcgagccaggtctgcgtgccgtacgccatgccgaccggcgggagcgcgccgtggtcgcagtcgcggaacacttcgcgcacgccatcctcatgcgccagcgacagcttgcggccggtctgctcgcagatctccgacagtttcaggtggtgagtcgaaggaatcacggcagcgacgtagccgctgctgtcttccagcaggacggtcttggccagtcggtctccgggaatgtgtgcggcctgcgcagtggccatgctgctgaggctgtaggggtgccggacggtgtcgaactggctttgcttcttgctcaggcatctcgccagcgtggtagacatggtcatgatttcaacctccgacgcgcgcagcgcgaccgttgtccgagtcctatcaatataggtcgtcgggggtcgggtggcggtggggccgagccaggacgtagccggcaagcacaaaaaaagggcaccttgcggtgcccttagtgtgttgtgccgccggccccggggccggcgatattccctgcttattcttcctggaacgcttcctcgcgcttggccttgatcgacggcatcgccacgatcagcaccagcacgccagcggcgatcagcaggcccagcgacagcgggcgcgtcacgaacacgctgaagtcaccacgcgacagcagcagcgagcggcggaagttctcttccatcatcggccccagcacgaagccgagcagcagcggcgcgggttcgcacttgagcttgatgaacaggtagcccaccacgccgaaggccgcggtctggaacacgtcgaaggtggtgttctggaccgagtacacgccgatgcagcagaacgtcaggatggccgggtacaggtagcggtaaggcaccttcagcagcttcacccagatgccgatcagcggcaagttcagcacgatcagcatcaggttgccgatccacatcgaggcgatcaggccccagaacagcgccgggttgctggtcatcacctgcgggccgggctggatgttgtggatggtcatcgcacccaccatcagcgccatcaccgcgttgggcggaatgcccagcgtcagcagcgggatgaaggaggtctgcgaagccgcattgttggccgattccggacccgccacgccttcgatcgcacccttgccgaattcctgcggatacctggaagtcttcttctccagcgagtaggcagcaaacgaagccagcgatgcaccgccgcccggcaggatgcccagtgccgagcccagcagcgtgccacgcaacaccgccgggatcatgcgcttgaagtcttccttggtcgggaacaggttggtgatgtggtcggtaaaggtttcgcggtgttccttctgctccaggttggcgatgatttcagcaaagccgaagatacccattgccaccgagacgaagttcaggccatcggtcagttccggcacgtcgaacgagaagcgcgcggcgcccgagttcacgtcggtgccgaccaggcccagcagcaggcccagcacgatcatggcgatggccttgaccagcgaacccgaagccagcaccacggcgccgatcaggcccagcaccatcagcgagaagtattcggcggggccgaacttgaacgccagttccgacagcggcgcggcaaaggcggccaggatcatggtggcgacgcagccggcgaagaacgagcccagcccggctgtggccagcgccacccccgctcgtcctcgccttgccatctggtagccgtcgatggttgtcaccaccgaggatgattcaccaggcaggttcaccaggatggcggtggtcgaaccgccgtactgggcgccgtagtagataccggccagcatgatcagcgcggccaccgggggcagcgtgtaggtcaccggcagcagcatggcgatggtggccagcggccccaggcccggcagcacgccgatcagggttcccagcacgcagcccaggaaggcgtacgcgaggttctggaaggtcagggcggtggagaagcccagacccaggttggcgagtagttccatgttggcggcctccttagcttgccaggaaagccggccacaccggcatctgcaggttgatgccgtacacgaacgcgcccaggctgatcagcaccaggatgatggcgttgaggatggcacccttccagctgaattcatggctggccatcgacgacaccagcaccagcaccagcaccgacagcaccatgcccagcggcttgagcagcaggccgaacagcaccaccgaaccgaggatccacaagagcgtcttgatgtcccagcgggccaggttgtcttcttccgacttggaagacaacgagccccacagcaccagcacgcccagcagggcgagcacgatgccgagccagaacgggaagtatcccggtcccatttttgcggcggttcccatggaataaccgcgcgcgacccaggaaaagccgaatccgaccaggatgaacatcaggccggaggcgaagtccttttggctacgtatgcgcaaagtgaatctcctcgataagactgcttgaaatctcaggagggctcccttcctctgcctttgttgcgatgcatcaatgcggcagtttgcgggagctctcctacgggcagggtggaagttaagggggcgacctttcagctacctttcagatgtctgcaaacagggtcatgctgagggtatcccctagtgaaagagcgtttaaaagtgccgccaagccaagctgggagcgggttggcgggccgtggcgccagtcgctgcgctatcatccggggcggtcgtgcgccgtgcggcgctacccgccgctgaaaggtttgaaaggttccgcaaggaaccactacgcaacgcgaggagcggtttggagagcattgaccacatcattctgatcggcgccgtcgtgatgtcgctgggcatcgtgctgggggctttctcggcacgcctgggcgtgccgttcctgctggtcttcctggccgtgggcatgctggccggcgtggacgggccgggcggcatccgtttctccgatacctggctcagcttcctggtcggcaacctggcgctggcggtgatcctgctcgatggcgggctgcgcacgcgctttgccaccttccgggtggcgctgaagccttcgctgtcgctggcgaccgtgggggtgctggtgacggcagcgctggtcggcgtgttcgccgcgtggctgctgggcatcgactggaggctcgggctgctgcttggtgccatcgtcggctcgaccgacgcggccgcggtgttctcgatgctcaatagcagcggcatccggctgaaggagcgggtggcgagcgtgctcgagatcgagtccggcatcaacgacccgatggcgatcttcctgaccctgacgctgatcgaatggctgaccgcgcctgacggcctgacgccgctgggcctggtcacgcggctgctggtgcagttcggcgtgggcggcgtgctcggcctggcgctcggctattgcctggcccgcgtgctggagcgcatccgcgtggccgaagggctgcaggcgatcctgctgtgctcgggcggcgccatggtgttcgcgctggtgcagagcgccggcggcagcggtttcctggcggtgtacctgaccggcatgctgatcggtaaccgcgagcgcgcggtgacgccggacaccatgcgcgccatggacggcatggcctggctggcgcagtcggccatgttcctgctgctgggcctgctggtgtcgccgcaccggatctgggaggtggccggtccggcggtggcggtggcggccttcctgatgctggtggcgcggccggtggcggtgtggctggcgctgctgccgttccgcttcaatgcgcgcgagaccggctttatcgcctggatgggcctgcgcggcgcggtgccgatcgtactggcgctgtttccgctgctgcgcgaggtgccgcaatcggggctgctgttccggatcgcctttgccgtggtgctggccagcctgctgttccagggcaccacggtgtcggtggcggcgcgcctggcgcgcgtgcggcgccccggctaccccgagccgctggcgcgttcgcgcctgcgcggcacgcgcgcgccgatcctggaggtgatgcagttcgaggtggggcccaatgcgcccgtggagaacgtgcgcgccgaccagctggagctgccgccgcgctgccggctgctgacggtggcgcgcgacgatgcgctggcggcgctggatcagaccgtgctgcgcgccggcgacagcgtctcggtgctggcgccggtgacgaccctgccgatgctgtcggcgctgttccaggcaccgggccgcgcgcctacctgggagcaggcctcgcatgatttcctgttgtcgggcgatgcgctgctgcgcgacgtcgcggcactgtacggcacgcgcgcgctgaccccggaagaggagccgctgacgcttgagtctgccatgcagcgggccttcacctcgccgccggtggagggcgacagcgtcgcgatcgccggcctgccgctgacggtgacgcgcatggaaggcgcgcagatcctgcaggtggggttgctgctgccgcggctggacggggattcgggcgggcggctatggccgcgccggcgcaaggaaggggcagagcggggcggggagggcgccgaggcggagtaatgacaaaaaaggcggccatggccgccttgttttcaatccaccttcgccccggataccttcacgatctgcgcgtatttcttcagctcgcgctggatcagcgccgcgaactgctcgggcgtggtcggtgccggctgtgcgccgatgcgggccaggcgtgccttcatctcgtcggtcttcaggattgccacgatctcatggttaagccgctcgacgatctcgcgcggggtgttggccggcgcgaacacgccgaaccacgtcgagatgtcgaagccttccaggcccagccccttgccggcttccgcgatggtcggcagttccgggaaggccgcggcgcggctggcggtggtgaccgcaaaggccttcagcttgcccgccttgatattggccgaggccgaagccaggttgtcgaagatcaggtcggtctggcccgacagcaccgacagctgcgccggtgcggcgccgttgtacgggatatggaccatgctgaccttcgccatgctcttgaacagctcgcccgacaggtggccggcgctgccgttgccgcccgaggcgtaatccagcttgcccggattcttgcgcgcgtacgcgaccaggtcgcgcacattgttgatatgcaggtcggcggccttgcccgggtgcatcaccagcacgttggggacgtcggccaccagcgtgatcggcgcgaagtccttgaccgggtcgtacggcatcttgctgaacagcgtcgggttgatggcgtgcgtggccaccgcgcccatgacgatggtgtagccgtcggccggctgcttggcgacgtagtccgcgcccaggttgccgcccgcgccgggcttgttctcgaccaccaccggctggcccaggctgtcgcgcagcttctcgccgatggcgcgcgcgacggtgtcgagcgggccgccggcggggtagggcaccacgaagcggaccggcttggtcgggtaggcattggtggccgccacggcggcggcgggcagcagggccgcggtcagcgcggcggcaagcagtttcttcagcatgtttcggacttcaggggattgggattcttatctggcgccgatgccccgcgccatcatgaccgcgcacagcggcagcaggatcaccaggtgggcttcgatcatcacccagcggcgggcggccttcaactcggacggcggcggcacgtaatccggcagccggcgcgcctgcttgcgccagcgcgcgatggcgaaggtcggcggcagcgagcacagcgcgatcagcacgaacacgcccaccttggcatggaaccacgggttgtgcaggtagaagtcggcgcccttggcgccgtagaacaggcgcagcaggccggtgcccagcaccaccatcgccgacaggaaatagaacaggtcgtacagcgacaggcgccgcaccgcggccggcgtgatttccgggcgcagcaccacggcctcggcggccatcagggtgatcaggacgaagatcgcaaggaaatgcaggaaggacagtatggcgtcggtcagcatggattctcctttgcctttgcttcagtggggactgaactgcttcgggaaggcaccggcggggcaccagggccgcccgccggcaggaggagaatcttacagcacaccctttgcacgcagcgcttcgatctgctcagggccgtagcccagcgtctcggccagcaccgtgtcggtgtgctcgcccagcagcggcgggtggcgcagtgcctgcggcggcgtggcgctcatcttgatcgggctgcccaccagcctgacctcgccggcgctggggtggggcaggtccacgcgcaggccgcgcgccttgacctggtcgtcctcgaacacgtcgtcgagggtgttgatcgggccgcacggcacgccggcggcctccaggtcgcggatccactgggcgcgggtgcgcgggcgcaccatctcggccaggatcggcaccagcacgtcgcggttggccacgcgctgcgggttggtggcaaagcgcgggtcgtcggccagctcgggcttgccgccgtcggtgacgaacttgcggaactgcccgtcgttgcccaccgccacgatgatccagccatcggcggcctggaaggtctggtaggggacgatattggggtgcgcattgccccagcggcgcggcgcctggccgctggccaggtagttggtgttcatgttggccagcatcgccacctgcacgtccagcagggccatgtcgatgtactggccctcgccggtgcggtcgcggtgcgccagcgccgccagcacggcgatggtggcgtactggccggtcatcaggtcggaaatggccacgccggccttctgcgggccgccgccgggcaggtcgtcgcgctcgccggtcaggctcatgaagccgcccatgccctggatgatgaagtcatagcccgggcgcgcggcgtacggcccggtctggccgaagccggtgaccgagcagtagatcaggtcgggcttgacctgcctgagcgactcatagtccaggccgtacttcctgagctggcctaccttgtagttctccagcaccacgtcgctctgcgccgccagctcgcgcacgatctgctgaccttccggcgtgctgatgtcgcaggtcacggagcgcttgttgcggttggcggccaggtagtaggcggcttcggcggtgtcgcggccgtcctcgtccttgagccagggcgggccccaggtgcgggtatcgtcgccggcgccggggcgctcgatcttgatcacgtcggcgccgaaatcggcaaggttctgggcgcaccacggcccggcaaggacgcgggtcaggtcgaggacgcggagatggcttaaagctcccatggcggtagtcaatgcagtgggtaaggcgggggatcggtcgcaacggcgagggggcggcgcgcccctgcaagcaggggccagcacgggttgcctgcaatgtaccaccggcaaatcgccggtgcggctttgggtgctttataaggcgcttgtggcgatgggatttgggcgatagccggccggctccccggcgccatgcctgacgtgcccggcaggctgccttgcccgtataatcaacggtttgcaaatccaatactgattcgtcgcgcccggccacgccagggcaagcgtccgccatcccatgaaagtctcagacattcgcagcaagttcctgcagttcttcgaatcgaagggccataccgtggtccgctcgtccagcctggtgccggcgaacgacccgacgctgctgttcaccaactccggcatggtgcagttcaaggacgtgttcctgggcaccgacaagcgcccgtacacccgcgccacctcggcgcagcgctcggtgcgcgccggcggcaagcacaatgacctcgagaacgtgggctacaccgcgcgccaccatacgttcttcgagatgctgggcaacttctcgtttggcgactacttcaagcgcgatgccatcctgtacgcgtgggaactgctgaccaagacctaccagctgccggccgagaagctgtgggtgacggtctacgcggaagacgacgaggcctacgacatctgggccaaggaagtgggcgtgcccgccgagcgtatcgtgcgcatcggcgacaacaagggcgcgcgctacgcctcggacaacttctggcagatggccgacaccggcccgtgcggcccgtgctcggaaatcttctacgaccacggcccggacgtgtggggcggcccgccgggatcgcccgaggaagacggcgaccgctacatcgaggtgtggaacctggtgttcatgcagttcaaccgcgacgagcagggcaatatgacgccgctgcccaagccgtgcgtggacaccggcatgggcctggagcgcattgccgcggtgctgcagcacgtgcacagcaactatgagatcgacctgttccaggcgctgatcaaggccgccgcgcgtgaaacccatatcgacaacctgaaccagaactcgctcaaggtcatcgccgaccatatccgcgcgtgctcgtttctgatcgtcgacggcgtgatccccggcaacgaaggccgcggctacgtgctgcgccggatcatccgccgcgccatccgccatggctacaagctgggccagaagaccccgttcttccacaagatggtggccgatctggtcgagcagatgggccaggcttatcccgaactggctgaagcccagtcgcgcgtgaccgaagtgctgaaggccgaggaagagcgcttcttcgagaccatcgagaacggcatgtcgatccttgacgccgcactggccgacctgaagctcaagggcggcaagacgctggacggcgaactggcgttcaagctgcacgacaccttcggcttcccgctggacctgacgcaggacgtgtgccgcgagcaggaaatcggcgtggacgaggccgccttcgacgcggccatgaaccgccagcgcgagcaggcgcgcgccgccggcaagttcaagatggccgccggcctggagtacaccggcgacaagaccgtgttccacggctacgagaagctggaactgccgcaagccagggtcaccgcgctgtatgtggacggcgccgccgtgaacgccatgcagccgggccagaccggcgtggtggtgctcgacaacaccccgttctacgccgagtccggcggccaggccggcgaccagggcgtgctgaaggcaggcaatgccgtcttcgccgtgactgacaccaccaagatccaggccgacgtgttcggccaccagggcacgctggaaggcggcgcactcaaggtgggcgatgccgtgtcggcccaggtcgacgcgcagcgccgtgcgcgcaccgtgcgcaaccactcggccacccacctgatgcacaaggccctgcgtgaagtgctgggcagccacgtgcagcagaagggctcgctggtggatgcggacaagacccgcttcgacttctcgcacaacgcggcgctgaccgacgagcagatccgccgcgtggaagagatcgtcaatgccgagatcctgcgcaacgacgacacgcatgccgagatcatgccgttcgacgacgcggtcaagagcggcgcgatggcactgttcggcgagaagtacgccgacgacgtgcgcgtgctgtcgatcggcacctcaaaggaactgtgcggcggcacccacgtgcaccgcaccggcgacatcggcctgttcaagatcgtggtggaaggcggcgttgccgccggcatccgccgcgtggaagccattaccggcgacaacgcgctgcactacctgcagggcctggacgccaggctgaacgaagccgccgccgtgctgaaggcccagccgtcggagctggtgccgcgcatcggccaggtgcaggaccaggtgcgcgcgctggagaaggagctggaacgcctgaagagcaagctggccgcctcgcagggcgacgagctggccgcgcaggcggtcgacatcaagggcctgaaggtgctggccgcgcaactggacggcgccgacgtcaagaccctgcgcgagaccatggacaagctcaaggacaagctgaagagtgcggccatcgtgctgggtgcggtgtccgacggcaaggtcagcctgatcgctggtgtcaccgccgatgccacgggcaaggtcaaggccggcgagctggtcaactttgtcgcgcagcaggtgggcggcaagggtggcggccgtcccgacatggcccaggctggcggcaccgagccggccaagctgccgcaggcgctggctggtgtcggcgagtgggtggcgggcaagatctgactcgcgtagcgccgccgctggtttgcccccctctcccgcgtgcgggagaggggggcaaaccagcaggtcgggcctgacgttgtcacagaagcagaaagggcgccccggcgccctttctgctttttatttttccggcgttcccttgccgctgcccagcaccgtcagcaactccatcggcaacggaaacacgatcgtcgagctcttgtctcccgcaatctgcgtcagcgtctgcatgtagcgcagctgcatcgcctgcggctgccgcgccagcatctgtgccgcttccagcagtttctccgaagcctgcagttcgccctcggcatggatcaccttggcgcgccgctcgcgttcggcctcggcctgccgcgcaatcgcgcggatcatggtttcgttgaggtcgacatgcttgatctcgacgttcgagaccttgatgccccaggcgtcggtctgggcgtccagcgcctgctggatgtcgaggttgagcttctcgcgctcggccagcatctcgtccagctcgtgcttgcccagcaccgagcgcagcgtggtctgcgccagctggctggtggcttccaggaagttcgccacctggatgatggcgcgttccggatcgaccacgcggaagtacaccaccgcattgaccttcaccgagacgttgtcgcgcgaaatcacatcctgcggcggcacgtccatcaccaccgtgcgcaggtccaccctgaccatctgctgcacggcggggatcagcagcaccaggcccgggcccttgacccgccagaagcgtccgagcatgaacaccacgccgcgttcgtattcgcgcagcacgcggaacgaggtgatcaccagcagtgccagcaggaagatcaaaccgccgaagctgaatccgtaggccatggtcaggctcccttgtctggcgtcggttggggtggagttgtcgggacaagcggggcgttgccggcggcgatcacctcgagcaccaggcccttgcgcgcggtgacgaccaccggcgtgccgcgcggcaaggagctggcgctgtgcacgcgccaggtctcgccgcgcaccgtggcccagccttcctcgcgcaggtcgtccagcatttcgccgcgggcgccgaccagggtgtcggcaccgctgaccaccgggcgcttgcgcgagcgcaccagcatcgccgacatgccgaacacgaaaatcgcggacagcgctgacatcgccgccaccatcggcagcggcacgccgaagcccggcacgtcggtgtcgatcagcatcaccgcgccaaaggcaaaggcgatgatgccgcccacgcccagcgcgccgaaggacggcaggaacagctccgccaccatgcagccgatgcccagcgccaccagcgccagcccggcgtagttcacgggcagcatgtgcagcgcgaacagcgccaccagcaggcagatcgcgccggcaatgccgggcactaccatgcccggcgtggagaattcgaagatcaggccgtagatgccgatcatcagcagcagcagcgccacgctgggctcggtgatcacggccaggaagcggttgcgccagtcgggttccagcgtcaccaccggcgcattggcggtgtgcagcacgccggccttgccaccggcagcggtgatcgtgcggccttcaacctggcgcaacagcgcgggcaggtcgggggcgaccaggtcgaccacgcgctgggccagggcctcgtcggccgacaggctgaccgattcgcgcaccgcgcgttcggcccactcggcattgcgtccgcgcagctgggccaggccgcggatataggccgaagcatcgtgcatttgcttgcgttccatcgcgtcggcccgcgctggctcgctggcgggggtggaggcgggcttggcgccgggcagggcctctggcttctgcggcccgccaatgccgacctgcaccggggtggccgcgcccaggttggtgcccggcgccattgccgcgatgtggctggcgtagaggatgtaggtgccggcactggccgcgcgcgcgccgccgggatagacgtagctggccaccggtatcggcgaggccaggatggcctggatgatctcgcgcatggacgcgtccagcccgcccggggtgtccatttccagcaccaccagctgggcgccgcccgcgcgcgcgcgttccatgctgcgcaggataaagctggcgctggcggggctgaccgcacccttgagcggaatcacgtagaccggcgcggttgccgtggtcgtgacggtggcggcaggcgccgaggcgccggagggcggcgccgcacgggcacctgggccggcgagggcaacggcgccgcacgccagcgccaggccggccagcagccggccggacatcggccgaagggcccgcagcagcgcggtggcaggtttcatgagaggggcggggcacgcaaggtgccgtgatggcgccacttcaagtgtaggccaccgggcacatcttgcacgcgggctgcctcgggcccgcgcgccgggcgctcaggccgccgccaggtccggcctggccgaggggccgggtgagtgggcggtgagcgtgtcgatcagcgcatgcaaggccgcgctggccatggacggatgccaggccagcagcgtgcgcacgcggccggccgcgcccaggctgtgctggcggatggcgggcaggtcgcggtacagccccagcaccgagcgcggcacgatcgccgcgccgatgccggccgcgacgcaggcgacgatggcatggtacgagctcagctgcagcacgcgcggcgtcggcgcatcgccgatcacataccagttctcgagccgggcgcggtagttgcagccgggctcgaacgccagcagcgtcggcacctccaggtcggccgcggtgcgcaccgggcgatggcgggcgcgcgtgatcaccaccagctcttcctcgaacaccgggacggcgctcagtgccgggtcggtcagcggctcggcgacaaaggcgcattcgacttcgaagcgcgccagcgcatccagcgcctggcgcgtggccagcgtcaccagctccagctgcaccgcgggccaggcctggtggtacgcggccagcacattgggcaggcggctggcggcggtgctctccatcgaggcaatgcgcagccggccgtgcggccgcgccggcagcaccgcctggcgtgcctcttcggtcatgctgaggatgcggcaggcatagtcgaacagggtctgcccggaaggcgtcagcaccatgcgccggccgtcgcgcacgaacaggtcgaccccgagcgactgctccagctggcggatgcgcgtggtgacattggactgcacccggtgcagccgctcggccgcacgggtgatgccgccggcttcgacgacggcgcggaagatctcgagggcggcaaggtccatgcgggactcctgaggctattcatctcttatcaagatgcctgacatcttgataattcattttttggaatgatgaagccagcgtagcatacaggcatcgcaatgcaaccgctgccccgccagcctccagccatgccgaacccccacagcctcgaccctgaacaccccgccgctgcgcgcgtggccacccgggcgtcggcacggcgcgaagccggcgcggtggcggtggccatggccggcctggtatcgctggcggtggtgatgggcatcggccgctttgcctttacgccgctgctgccgatgatgctgcatgacggcaccgtcacgctggatcagggcggctggctggccacggtcaactacatcggctacttcgccggcgccgcagtgtgcatgttcatccggcccgacgcggtgcgcatggtgcgctggggcctggccgcaacggtgctgctgacgctgggcatggccctgccgggcggcatggcggcatggtcgctgtggcgcgccgccgcgggcgtggccagcgccgtggtgatggtctacaccgcggggtggtgcctgcagcggttggcggaactgggcaagccggaactcgccgggctgatcttctgcgggccggggctgggcatcgtggtcactgggctgggtgcatccggcatggtcggtgcgggctggcatgcggactatggctggctcgcgttcacggcgctggcggtggtgctggtggcggcggtctggcggatcttcgtcgcgcagccggctgtgccgatgacggcgccggtgtcggcatccccggcggcagccgacaccggcgccgcgcggctcgatgcccagacctgggcgctgacctttgcctacggcctggccggcttcggctacatcatcaccgcgaccttcctgccggtgattgcgcgcgaggcgctgcccggcacggtctgggccgacctgttctggccgatcttcggcgcgggcgtgacggtgggcgcgttcctggtcacgcgggtcggcatggcgcacgacaaccgcaagctgttgacgctgctgtacggcatgcaggcgctgggcgtggcgatcgcggtggtgttcccgaccgtggccggctttgccctcagcagcctgctggcggggctgccgttcaccgcgctggtggcgtttgcgatgcgcgaggcgcggcgcctgtgggggccgcaagcggcgcggctgatgggcctgatgacggcgtcctacggcctgggccagatcgccgggccgccgctggcaaccgcgctggtggcgcgcaccggcggctttgccggctcgctggcgtgcgcggcggcggcgctgctgctcggcgcgctggtgttcgcctggatgggccgcgcctggccgctggcggctgcccggagctgatcggcaaggtgcgctaaagtattgcctttgccgcctggcgcgccacgcgagcggctgccgcgcctggcgtgcagcccccgtggcgcggcacagaaggccggggccgtacccggcacgcgagaccgggcggcgcaggagcgaccccatgtcttttgccttgcagcccgcgcgtgccgcgggtgcccccatccggcccgtttccgccgaagaacagcgtgtgcgcgtcgacctggccgccgcctaccgcctggccgcgcgcgagggctgggatgacctgatctacacccatatctccgccacggtgccgggcgagtccgaccacttcctgatcaaccccttcggctttgccttcgacgagatccgcgccagcgacctggtcaagatcaacggccgcggcgaggtcgtcggcgcgaccgtgcatccggtcaatgtgaccggctttgcgctgcacgccgcggtgcatgcggcgcgcgccgacgcgatgtgcgtgatgcacctgcataacaccgccggcattgccgtatcggcgcaggccgccgggctgctgccgctgtcgcagcacgcgatgcgcttccacggccgcatggcctaccacgactacgaaggcctggccttcaccccggccgaaggcgcgcggctgaccgcatcgctgggtgggcatcccgccatgctgttgcgcaaccacggcacgctgacggtgggccgcaccgtggccgaggcctatgtgctgatggcgacgctgatcaaggcctgcgaggtccagattgccgcacaggcgggcggtgcgctggtgcagccaggcgcggccgtggcggacaagacctcggagcaactctacgacaacggcgccgtcgaaggcgtgatggagtggcccgcgctgctgcgcaaactggatagaatcgatccttcataccgggactgagcgggatcgatttcccgccgcgactcaaccacattcatcaaaggagcattgcatgccgactttccacgtcgaaatgtttgaaggccgtaccatcgagcagaagcgcaagtttgtcgaggaagtgacgcgcgtcagctgcgagaccctgggctgctcggcctcggccgtcgacatcatcatcaccgacatcaagcgcgagaactgggccaccggcggcgagctgtgggccgacaagaagtaaggctccattcagccccacactgaacaccatgcagcacttcgcctctgacaactacgccggcttctgcccggaatcgctcaagtatttcctggaagccaacgccagcggccatgagcaggcctacggcgacgattcctggacgcagaaggtctgcgaccgtatccgcgacctgttccagaccgactgcgaagtgttcttcgtgttcaacggcacggcggccaactcgctggcgctgtcggcgctgtgccagtcgtaccactcggtgatctgccacgagctggcgcatatcgagaccgatgaatgcggcggcccggagttcttctccaacggctccaagctgctgaccgcgcccggcgctgacggcaagctcacgcctgacgcggtcgaggcgctggtcacgcgccgctccgatatccattaccccaagcccaaggtggtgtcgctgacgcagtcgaccgaagtcggcaccgtctacagcgtggaagaggtgcgcgcgatcgctgccatcgccaagcgccgccagctgcgcgtgcatatggatggcgcgcgctttgccaatgcggtggcgtcgctgggcgtgcatccgtccgagattacctggcgcgccggcgtcgacgtgctgtgcttcggcggcaccaagaacggcctgccggtgggcgaagcggtggtgtttttcgaccgccgcctggccgaggactttgcctaccgcgtcaagcaggccgggcagctggcgtcgaagatgcgctttatctccgcgccgtggctgggtttgctcgagaacgacgtatggctcgccaacgcgcgccatgccaatgcgatggcgcagctgctgcagcagcgcatcagcgatattccgggcgttcgcatcatgttcccgacgcagtccaacgccgtgttcgccgagctgccgctgcccgcgatcgaggcgctgcgcgccaggggctggcgcttctatacctttatcggcgccggcggctgccgtttcatgtgttcatgggacctgcagccgcagacggtcgaggcgctggccgccgacatgcgggcggcttgcggcgcctgaccggcacccatacctataacgacgagacccttcaggagcccccaaatgcaataccgattctgcccgcagtgcggcgcgccgcttgaggtgctgccgctgtccgggcgcgaacgccacgcctgcgtgcagcaggaatgcggcttcgtgcactggaacaacccgctgccggtgctggcggcggtggtggagtaccaggacaagctgctgctggcgcgcaatgccgcctggccggagaccatgttcgcgctggtgacgggcttcctggagcgtgacgagccgcccgagctgggcgtggcgcgcgaactgaaggaagagaccaacctcgataccgagtcggtgtcgctgatcggcgtctacgagttcatgcgcaagaacgagctgatcattgcctaccacgtcaaggcgaccggcaccgtggcgctgtccgaggaactggccgactacaagctggtggcgccggaggacgtgcgcgtctggtcggctggcaccggcttcgcggttgccgactggctggccgcgcgcggctatccggtgcgcttcttcgaccgccagaccggcgccgacattccggacccgcgccgcccgcacgacttcagcctggtcgggggttcgctacaataccgttggtgaggctggcctccggccagccgcccagcccccagaatcgaaggaagagacgaatggagttccagaaagaagtggatgcgcgcggcctgaactgcccgctgccgatcctgcgcaccaagaaggccctggccgacatggccagcggcgatgtgctcaaggtgctggccaccgatcccggcgccacgcgcgatttccaggcctttgccaagcagaccggcaatgagctgctgtcgcactcggaagtggacaaggtgtttgtgttctacatgcgccgccgctgaagcgctcccgctcccaaagaaaaaagccgcgtaatcagaattacgtggcttttttctttgggattctgcgtcgatgaatatcggcacgattttccaggcgcgcggcaatgcgagattggcgtaaattgcaagtcctgcattattcctggcgggacatctcgcaaggattaatcccattgcgtttccgccggttttgggctgcattattctccccataatggcggcgccgcggcacatgtgtttacccggattgggctggtttttatgtatgcgctaaattactactgcgcccttgcctggtgccgtgatggtcactgtggggagggcggaagttgatcaagtgattcaggagaggcgatgccaagggacgtccgtatccgagccgctggaattgccgatattcaagctatttcggaagtgctgcagcaatgtgggttgtcagttgaaaatgtgaggccggccgcatgtctgtgccatgtcgctgaattcggggaaatcgtagctggttgtgcctgcggggagatattcgaccagacctttgtcgtcaggaccgttggcgtgcttcccgattttcgggagcgaagaattgcgacccatctggttgcggccctgttgatgcgcgcccgtgctaacggttgcaccaaggccgtcctgctgacgacggagcatccggccttttttgcgcgctatggcttctcgctgacatccgtggacgagttgccgaccgaactggaattgtccagggaatttcaacgccgcttcggcgcctggacgcactgcatgtgccgccgcctggactgaggcggggcaagacgcagcgcagcggcccgatgggccgccgcgtcgccggctgcgcgccggcgggcttcaggtgatcgcgctcagctgccagggtacgaactcgttctgcccgtagccgtgcagctcgctgcgtgaacgtttgccggaggcggtgtccagcatcagccggaacagttcctcaccgagcccgccaatggtggcgctgccgtccagcacggcgccgcagttcaggtccatgtcatcggactggcgttgccacagcgcggtattggtcgccagcttgaccgagggcgagggcgcacagccgtaggccgagccgcgccccgtggtgaagcagatcaggttggcaccccccgcgacctggccggtcgcggagatggggtcgtagcccggcgtgtccatgaacaccaggccgcgcgcgcgcaccggctgcgcgtactcatagacctcggccaggttggccgagccgcccttggcgatgccgcccagggatttttccagcacggtggtcagcccgcccgccttgttgcctgccgacgggttgttgtccatgctggcaccgtggcgcgcgcaatagtcctcccaccagcggatgcgcgccaccagcttgcggccgatttccggtgtctgtgcgcggcgcgtgagcaggtgctcggcgccgtagatctcgggcgtctcggagaggatggcagtgccgccgtggcgcaccagcaggtctaccgccgcgcccagcaccgggttcgccgagatgcccgagtagccgtcggagccgccgcactgcaggcccaccaccaggtggctggcaggcaccggctggcgctgcacggcattcgcggcgggcagcatctcctggatcatggcaatgccgcgtgcgatggtcctggtggtgccgccgctgtcctggatggtgaaggtctgcaggcggtcgtcgtgggccagcccctgggtggcaagcagcgccgaaatctggttggtctcgcagcccagcccgatcaccagcacgctggcgaagttgggatggcaggcatagccgcccagcgtgcgctgcagcagcgccagcccttccccctgcgggtccaccgcgcaaccgacgccgtgcgtgagcgccaccacgccgtcgacgttgggataggcggccagcgcctcgggatggatgtcgcggcggaagtggtcggcaatggcgcgcgccaccgtggccgagcagttcaccgaggtcaggatgccgatgtagttgcgcgtggccacgcggccatcggcccgcacgatgcccgcgaaggtggccggcgccggcaccggctccggcgcgcgcgcatcggcgccataggcatagtcgcgcgtgaagtcgcccatggccaggttgtgggtgtgcacgtgctggccggggcggatgtcctggctggcgaagccgatgatctgcccgtagcggcgcaccgcctcgccggcgccgatggcgcgcgttgccaccttgtggccgggcgggaccaggccgagcacagtcacgtcttcttcgtcgagcgtggtgcctgccacgagctggtcgcgggcaatgacgacgtcgtcttccgggtgcagccggatcacgcgcaaggcggcgtgcagctgtgctgccttgccggggttggcaggtgcgttcatgcgatgagctccctcgttccttatttcagcatctcggccggcagcgacaggccgaaatagcgcttgtagatgtcgttgatcctgccgttcttcaggttggtcctgacccagccgtcgagccagtccttgagggcggtatcgcccttgcgcaggccgatcgcatagggaaaggtctgcatcacgaacttgatttccaggtcgcgcgacggattgctgcgcctgacctccggaatcacgctgatggccgcggccaggtagtcctgctggccggtggagaccgcggtattggtggtcgcgtcatcctcgtagcgcacgatattcaccgctgccacggccttggcgccccggctcagttcctggtcgctggtggtgccgcgcgtgaccgcgacggtcttgcccgacaggtcggcgaaggacttgacctgggccttggtcgggccgcccaccaccacggggatcacgccatacggctcggagaaatcgatgaccttcttgcgcgcgtccgtcacggaaaaggaggccagcaccacgtccgccttgcgggtgaggaggaagggcacgcggttggggcccgtgaccggaacgatctcaaggtcgacgcccaggtccttggcgagcaggcgcgcggtctcgatgtcggagccgctctgcctggcttgtgtatccagcatgccgtagggaggcgcgctgatatcgaccgccaccaggatcttcttgcgctgcttgatggtgtcgagcgtgtcggccgaggcggcggaggtgccggccagcagcagggcggcgagtggggcaaagagatagcggcgatagttcatgaggttgtctccatattgttggatatcgaaacgggttcttgctgagcgggcgctgccgcgcttacaggccgttgctgacgaactggcgcagttccggcgtggcaggttcgtcaagcagcctgccactgccgcattcccagacgatgccctggtgcatgaacatgatctggtccgccaccgagcgcgcgaacgacatctcgtgcgtgaccagcaccatggtcatgccgtcttcggccagtttttcaatgacccgcagcacctcgccggtaagctcgggatcgagcgcggaagtgacttcgtcgaacagcatcaggcgcggctgcatggccagcgagcgcgcgatggcgacgcgctgctgctggccgccggagagctgttccgggtagtagtcggcgcgctcttccatgccgacttgccgcagcacgtggcgggccagttcgcccgcttccttgcgccccatgcccttgaccttgcgcggtgccagcatgacgttctcggccacggtcaggtgcgggaacaggttgtagctctggaacacgatgccgacttccttgcgcagcgcgcccaggtcaacggcgtcttcgtgcatggcatggccgcacacatgcagggccccgccgctcacgcgctccagcccgttgatgcagcgcagggccgtgctcttgcccgagccgctgcggccgatcagggccaccacctcgccgcggcgcaccgagaagctcacgcccttgaggatttccacttgtccgaaggacttgcttaccttgtcgaagcggaccacttcgtccacgcttgtctccatgacgttcctttgttgtcgggttttggcgctgtcaggctcaggcgcgtgccttgttgaagcggcgctccaggcggtacgagagcgatgagagcggatagcagatggcgaaatacagcgccgcggcgatggtgaacaccagaaagggcttgaaggtggagttgttgaccacccgcgccgaataggtcaggtcgaagaagccgatcaccaccgcgtacgacgagttcttcacgatctgcaccaggaagctcaccgtgggcgcaatggcaatgcgggcggcctgcggcaggatcacgtacaccgcccgctgcagcggcgtgagcgccaggcattcggcggcctcccactgcgtgcgcggcacggcctggatgcagcccttccagatctcgccgaggtaggcgctggaatacgccgtcatcgcgatccccgcggcgaccagcgccggcagctcgaagccgcccacgctgatgccgaaatacaccacgaacatgatcaccggcagcggcacgccctgtaccagctgcacgtaggcgcccgtgagcgtgcgcagcacgcgcccgccgcggctgcgcgccagcgccagcggtacgcccaccagcgcgccgccggcaaagcccatgcctgccagcagcaaggtccagcctgcgccgcgcaggatgaacaacacttgatcgaaagaaattccgtgcatgaggcgcgctccggttcagagaggggtttgcaggcgccggcggcgcgtaaaggccagggcgccgatgcctgccatcgacaggcgcagcagccaggacagcagcaggtagacgagcgcgatcaccaggtagatctcgaagccgcggaaggtctccgactggatgcggtagcccaccgctgtgagttcctcggccgagatctgcgacatgatcgaagtggccagcatcatcagcacgaactggctgatcagcgccggatacatgcgctccaccgcttgcggcaacaccaccaggcgcagcatctgccagcgcgacagccccaggcaggaagcggcctcgagctggccgcgcggcaccgactcgatgccggcgcgcacgatttcggtggtataggccgacacgttcacgaccagcgccaccactgccgccgccatggccggcacccgcacctgcaccgccgccagcccgaagaagagccagaaggcctggatcaccagcggcgtattgcgaatcacgtccacatacaccgtgacgcagcggcgcgcccacgcggggccttgcgtgcgcaccacggccagcgccgtgcccagcacgaagccgaacacgatggtggcgaccgacatgcgcaaggtcagccacacgccgtcgagcaagtcccgccagcccgtggacaggaaactgaaatcaaactggtagtccatcggcgcgggttcctccttctcgtggcgccgccgcggccggcgcgcgccctgtctcttgttgtggcttcgttgtcgtgcttgcggcgtgcgacacgcgccgtggtgggatgaaatatatgaccattgccggcaatgatcaatatccgtggatacccgtgtatgatggaatgcgatgagatgccctggcgtgccgccatggctacactgaccgaccgccacgttctggagacaaagtgccgagcccatcgatgacgacacgagaccgaaatcgcgtcgccccccttgctgccagcctggaagcggaggaagccagccgccatgcgccgatctacgcgttgatccaccaggtgctgcgcaaggcgatgctggacgggacgctggagcagggcaccgtgctgctggaagggccggtcgcggagattctgcgcgccacccggtcgccggtgcggcaggccttgcgcgagctggaggccgaaggcctggtcagccgcttcgacgggcgcggctatgtcgccggcccggccggcaccgagcccaggcgtgtgccgctggacgcggccatgctgggcgtggacagcgcgccggacgtggcacgcaagacgctgggctgggaggtcatctacgacgaggtggagcgcaacctggtccacctgtcggtgttcgggcgctaccgtgtcaacgaagtcgagctggcgcgctatttcaacgtggggcgcaccgtggtgcgcgatgtgctgctgcgcctggaaagcctgggcatcctggagaaggacgagcgccagcgctgggtcatcatcccgctggatgcgcagcgcatccacgatctctacgagctgcgctcactggtggagccggccgcgctgcgcggcgccatcgtccatgcggacgcggccgagctggctgccatgatggaagacctgcacaaggtgcagcgtgtctacccgaaggtgtcgcgcaccgccatggacaagctggagcatgacctgcacgtgcgcctgctgtcgctgtgcccgaacaaggagctgctgggcagcctgcagcgcacgcgctgcatcctgaccctgagcaagcatgtactgggagcgtcggcgccgatgccgcaggaagatcccttcctctccgagcacatggccgtgctgcaggccgccgccgcaggcgcgccgcgcaaggccgctgagctgttgcgggaacacctggagctgtcgtgcgcgaaggtcacgcagcgggccgggctggtgcgcgaaacgttcgcgctgccgacggtgtcctacatcgcctgagcgcaaataaggagaggccgcaaccctcccggcatttgccggaatggttgcggcctctcacggctgcagacgtccaggaacttcctttcctgtccgcagggcagggcgcgatcagctgccgatgccggtcaggtgctcgcgcgattccaggtaggcgctgaattcagtcccgacttccgggtgcttcaaggcaaattcaacggttgccttcaggtagcccagcttgctgccgcagtcatagcggcggccctggtagcggtaggccagcacctgctcctggcccagcagcgactggatcgcgtcggtcagctgcagctcgccgccggcgcccggcttcaggtcacgcaggtgttcgaagatgcgcggggtcaggatgtagcggccgaccacgcccaggttggacggcgcgtcttccggcgccggcttctcgatgatgccggagaccttgatcacgtccgcatcccattcgcggccgtcgatcacgccgtaggagcggctttgctccggcgtgatctcctcgacccccagcaccgagcagttgtagtggttgaaggtatccaccatctgcttcatcaccggcgggttgccgtcgatcaggtcatcggccagcatcactgcgaacggcgtgtcgccgaccagcttggccgcgcacagcaccgcatgccccaggcccagcgcttcgggctggcgcacgtagaagcattccacgttggcgggcttgatcgagcgcaccacgtccagcagcgcctgcttgttcttggcctcaagctccacttccagctcgaaggccttgtcgaaatggtcctcgatggcgcgcttggagcggccggtgacaaagatcatctcggtaatgccggcggccatggcttcttccacggcgtactggatcagcggcttgtccaccaccggaagcatttccttggggctggccttggtggccggcaggaagcgagtgcccaggcccgcaaccgggaacacagccttggtgacgcgattttccatatcaggtgtacctctcagattccagtccataaccctgccagccattgcgggcgtcgtctgtccggttctgtccgacgaagccggacagaacccccggcaggcaggggcgtgaatgcggccgccgtgccgtcaggccggcagccgctgcagctggccctgcagcttggccagcgtctgctcgaaatcggccaggcgctgcgtctcttgcgccaccacggcaggcggtgccttggcgacaaagctctcgttggagagcttggcgcggcacttgccgatttcgccaccgatgcgctcgacttccttcgacaggcgcgcgcgctcggcgccgacatcgatctcgatcttcagcagcaggtggttgcccccggcaatggcgaccggcgcgccggcgccttcagcctgcagggcagcttcatcttcgaagacgcgtacctcggaaagtttcgccagtgcctggatatgtgcgctcgccgccttcaggaaggtgctgtcaccctcagcatagagcgggatgcgctgggccggcgagatgttcatctcgccgcgcaggttgcggcaggcatcgatcacttccttcaggcgcgcaacccattgctcggcttgctcgtcgatcttggcgaccgcaggcagcgggtagggctgcagcgcgatggtctcggagccgtcacccttggcgcggccggccagcggggccaccttctgccacagctcttcggtgatgaaggggatgatcggatgcgccaggcgcagcacggtctcgagcacgcgcagcagcgtgcgccgcgtggcgcgctgctgggcctcggtgccgttctggatctgcaccttggccagttccaggtaccagtcgcagtattcgtcccagacgaacttgtagatggcgttggcgatattgtcgaagcggtattcggcaaagcccttctcgacctcggcttccacgcgctgcagcagcgacacgatccagcggtcggcctgcgagaaatccaggtagccgtctgggccgcagtcgttgttgcacgggcccatgccgcagtcatggccttcggtgttcatcagcacgaagcgggtcgcgttccacagcttgttgcagaagttgcggtagccctcgcagcggccggtatcgaagttgacgttgcggcccagcgtggccagcgacgcgaaggtgaagcgcagtgcgtcggcgccgaatgcgggaatgccctcggggaattcctttttcgtcttcttctcgatcttgggcgcgtccttggggcggcgcaggccggtggtgcgcttctgcagcagcgtgtcgaggtcgatgccgtcgatcaggtccaccgggtccagcgtgttgccctcggacttgctcatcttcttgccttccgaatcgcgcaccaggccgtgcacgtagacggtatggaagggcaccttgccgatgaagtgcttggtcatcatgaccatgcgcgccacccagaagaagatgatgtcgtagccggtcaccagcaccgacgacggcaggaagtgatgcatctcgggcgtttctcccggccagcccagcgaggagaagggcaccagcgccgacgagaaccaggtgtcgagcacgtcttcctcgcggcgcaggctgccggtgctgccggcggcctttgcctttgccagcgcttcttcttcggtgcggccgacaaagcagttgccggcatcgtcataccacgccgggatctggtggccccaccacagctggcgcgagatgcaccagtcctggatattgcccagccactggttgtaggtgctgatccagttttccggcaccagcttgatctcgccgctctgcacggcttccagcgccacctcggcgatcgagcggcccgggtagaaggtgccttccggcgccggcttgctcatggcgacgaaccactggtcggtcagcatcggctcgatcgcgctgccggtgcgctcgctgcgcggggtcatcagcttgtgcttcttgacctcggccagcaggccgcgcttgtccaggtcctcgacgatggcgcggcgcgcgtcgaagcggtccaggccggcgtaggcggcgggggcgtcggcaacgatcttcgcgtccagcgtcaggatcgacaactgcggcaggttgtggcgctggcccacggcatagtcgttgaagtcatggccgggggtcaccttgaccacgccggtgccgaactcgcggtcgacgtactcgtcggcaatcaccgggatctggcgctcggtcagcggcagctgcacgaacttgccgatcaggtgcgcatagcgctcgtcttccgggtggaccatcacggccacgtcgcccagcatggtttcggggcgggtggtggccacagtcaggtgggtcaggccgcccttggcatcagcctcgaccagcggatagtggatatgccacagcgagccttcttcctcgatgctgtcgacttccaggtccgacacggcggtgcccagcaccgggtcccagttgaccaggcgcttgccgcggtagatcaggccctgttcgtgcaggcgcacgaaagcttcggtgaccgccttcgacatctcgggcgacatcgtgaagtactcgcggctccagtcgatcgaagcgcccatgcgccgcacctggcgggtgatggtcgagcccgactcttccttccaggcccacaccttctcggtgaacttctcgcggcccaggtcatggcgcgacacgccctgcgactcgagctggcgctccaccacgatctgggtggcgatgccggcgtggtcggtgcccggcacccacagcgtattggcgccgctcatgcgcgcatggcgcgccaggccgtccatgatggtctggttgaaagcgtggcccatatgcagcgtgccggtcacattgggcggcggcagctggatcgcaaagtccgggcgggcagggtcgaaggtcggcttggcaatgccgcgcttctcccactcggggccccatttcgcctcgatggcggtgggttcgaagcttttggcgagggactggtcttgggcggtcatgctgggatgtcgatattggcgtcgggggtcgtcgcagggtgcttcggcctgcgcctggcgaggcggcggccgtcggcggccggcattgcgccagtaaaacgttaaattatacgggggtggcaggctggtgcctatttcccggccatccggccccgccggatgtgacttgcaggacagggcccgccggtataattgccgtcaatccacaaggctgatccgatgtccgacctgcttgccaacctgaacgccgaacaactagccgccgtcaccctgcctgacgaaccggcgctgatcctggcgggcgcgggcagcggcaagacccgcgtgctgaccacgcgcatcgcctggctgatccagaacggccgggtctcgccggcgggcatcctggcggtgacctttaccaacaaggccgccaaggaaatgcagacgcggctgtcgtcgatgctgccgatcaacacccgcggcatgtggatcggcaccttccacggcctgtgcaaccgcatgctgcgcgcgcatttccgcgacgccgggctgccccagacctttgccatcctggacagccaggaccagctctcggcgctcaagcggctgctcaagtcgctcaacgtcgacgatgagaagtacccggccaagaacctgcagtacttcatcaacaacgccaaggagcagggcctgcgcccggccgacgtcgaggccaacgacgacttcaacaagcgctttgtcgacctctacgccgcctacgacctgcagtgccagcgcgaaggcgtggtcgacttcgccgagctgctgctgcgctgctacgagctgctgcgctacaacgacgccatccgccagcactaccagcaccgcttccgccacgtgctggtcgacgagttccaggacaccaacgtgctgcagtaccagtggctcaagctgctggccggctacggcacgcagaacccggccgcggtctttgccgtgggcgacgacgaccagagcatctatgcgttccgcggcgccaacgtcggcaatatgcgcgacttcgagcacgagttccgcgtgcgccggctgatcaagctggagcagaactaccgctcgcacgggcatatcctggattcggccaaccacctgatctcgcacaacgcgcgccgcctgggcaagaacctgcgcaccgacgccggccacggcgagccggtgcgagtgttccagggcggctccgacggccaggaagccgcctggatcatcgaggagatccgcgaccagatcgcgcagggcgccagccgcgccgagattgccatcctgtaccgcagcaacgcgcagtcgcgcgtgatcgagcatgcgctgttctcggccggcatcgcgtaccgcgtctatggcggcctgcgcttcttcgagcgcgccgaaatcaagcacgcgctggcctatatgcagctgctggagaacccgcgcaacgatgcagcctttggccgcgtggtcaacttcccggcgcgcggcatcggcgcgcgctcgctggaagtgctgcaggacatggcgcgccagtatgactgcgcgctggccgaggcggtggcctacgtgcccggcgcggccggcagcaagctggcggcgtttacacgcctgatcgagaagacgcgcgaggacacgcgccgcatgacgctggccgagaccgtcgagtacgtgatcaaccacagcggcctgatcacccactaccagggcgagaaggaaggccaggaccgcatcgagaacttgcaggaactggtgaccgccgcgcaggccttcgtggtcgaggaaggctacggcctggaagcgctggccgcggtgatcccggttgaccgcagccccgccgccccggcactggccgacggcgaccaggcccagcaggtgctggatccggaagcgctgccggtggtgatgacgccgctggtcgcgttcctgacccatgcctcgctggaagccggcgacaaccaggcccaggccggccaggacgcggtgcagatgatgaccgtgcatgcggccaaggggctggaattcgacgtggtcttcatcaccgggatggaagagggcctgttcccgcacgagaacagcatgatggacccggacggcgtggaggaagagcgccgcctgatgtacgtggcgatcacgcgtgcgcgcaagcggctctacatgtcgttcgcgcaaagccgcatgctgcacggccagacccgctaccacgtgcgctcgcgcttcttcgaggaactgcccgaggcctcgctcaagtggctgacgccgccggcgcagggctacggcggcgtgcgccgccaggagcgcgacagcgcctggggccgcgactggttccgcaagcccgaggacgtgccctataccggcacgcgccccaccggcggcatggacaacggcaacggctatgccgatgccaagcgcgaggccggcaccggcttccgggtggggcagtcggtgttccacaacaagtttggcgaaggcgtgatcaccgcgctggaaggcgagggcaccgacgcacgcgccaatatcaacttcaagcgcaacggcgccaagtggctggcgctgtcggtggcgaagctggacgcgatcgactgaacgagtccggcttcgctgcgcgccatgccgcgacccgggcggctcagggcagggcgtggcggacctcgccagccttttcgtcggggctgtccaccgtcagcagcggattgatgaacagcgaggccagcgcgccaaccccgagcagcgcccccgagatcatgaacggcaggtcatagctgccggtgcgctcgatcaggtagccgaacaccaccggcgacaccatgccggccacgccgaagccggtgttcatcatgccgcccgcggtgccggcgtacttgccggcgatgtccagcggcaggctccacagcaccgcgttggtcagctccaggaagaagaacgacagcgacagcaggatcaccgcgttgacggcatcggccgtgaaggtcatcggcgcgatgaacatcagcgagccggccagccccacgaacaggaccgcgccgcgcgccaggcgcaggttgccggtgcgcttgtagatgcggtccgacagcacgccgccgagcgtatcgccgaccacgccggccatcagcggcagcgcggtgaacagcgccagctgcttcaggtcgaagccgcgcgcctccttcaggtacgagggcagccacgtcaggtagacccacagcgaccagccgtagcagaagtcgacgaaggtcaccagccacatgcgccggaacaggcgccgccacggcgtggccgccttggcggcctgccggctgtcgccgtgccggtagccgatctcctgcagctcctgcgcggtcacgcggctgtgcttgtcgggcgaatccttgaaaaagaaggcgtacagcaaggtccagccgaggctgaccgcgcccagcacgataaaggcttcgcgccagccggcggcggccacgatgaccagcacgaccggcggcgtgatcgcaccgcccagccgcgcgaagctgtgggtgatgccctgcgcgaagccgcgctccgccaccggcatccagtaggtgaaggcgcgcgtcgcggtcgggaacgcaccgccttcgccgatgcccagcacgaagcgcagcaccaccagaatcagcacgctgcccgcgaagccggtcagcacggtggccacgccccagatcagcgagaggacaatcagcaccttcttgggcccgaacttgtcagccatccagccgccgagaatctgcatggcggcataggggtaggcaaaggccgagaacaccagccccagctgcgatgtggtcagtcccatttcctcgcggatcaggggggcggcgaccgaaatgttgacgcggtcgatataggcgatgaaatacatcaggcacatgacgcccaggatcatgtgccgggtcttgatacgttgcttcatagccacctcctatgcgcggcgcgcgcgtggtgttgacggggcggcggccggcacacggtccgtagccatgcgcttgcggcgcgccgggggcgcggcgccggccgcgctgccccgtccttgagcaatctgtctgcagtcttgagtcgtgtctcctggtctggtggattccggtcgggcaggctccttggcgagggttgtggaagggggaaggttcaggcgtggttgagcagcttcagccgctgcaccttgccggacgggccgcgcggcagctcggcgataaagcggaactccttcggcgtcttgtagcggcccagctcgcgcaggcaatgcgcgcgcagcgccgcgtcatcgcagcgcgcggcctcgcgcatgaccacgtaggcaacgatctcctgcccgtaggccgggtccggcacgcctaccgccgcggcttcgagcacgcccggatggcgcagcagcgcctcgtcgatctcgcgcggggcgatgttctcgccgcccttgatgatcagttccttggcgcgcccgctgatgtagaaatagccatcggcgtcgcggtagccgagatcgcccgtgcgcagccagccatcgtgcgtaaaggcctcgcgcgtgatgtccggcgccttgtagtagcccgccatcacgctctcgccctgcagcacgatctcgccgacctgtccgtcaggagccggcttgccgtcgcgcccgagcacgcgtgcgcgcgtgccagatggcctgccgatgctgccgatgcgccgctggcccgggtcgagcggattgctgaacgccggtgcggcagtctcggtcatgcccatggtctcgatcacgccgatgccgaagcgcgcctcgaaggcgcggtgatgctcgggcggcagcgcggccgaggccgagcggcagaagcgcacgccggccggggcctggccgtgcggatcgttcagcaggtaggcgatgatggtcggcaccacgttcagccaggtgcatccgtggcgcgcgctgtcctgccagaacgcgctggcggaaaagcgcatcggcatcaccaccgagccgccgtgcaccagcggcgcgatcgcggtcacgaccaggccgttgatgtgatacagcggcagcgtcgccagcacccggtcggccggcccgaggcagtgctcgcggctgacgttggtgccgttggccaccaggttgcgctgcgtcagcagcacgcctttgggcgtgccggtggtgccggacgtgtacatgagcagcgcgggcgcgtcaggctgcggtgggggcagtggcgacgcagcatcatgcgtggcaggcagtgccggcaggctgttggcatcgggcgcggtgacgagcaccggcacgtccagtccggcctcgcgcagggcctcgcggatggcggcttctccgtcgggccaggtgaagaccagccgcgtatccgagtgcgccaggatgtagcgcagctgcgccggctggcacagcaggttgatcggattgaccaccagcccgcaggccatggtgccgagcaggagccgcgcggtctgctcgccgttgggcaggtacaccgacaccgtctggccgctgcccaggccggctgccgcatagctgcggccgagcgtgccggcgtccgtcgccagcgcgccgaaagtgagcgcatggccgctgtccggggacaacaggtagggcttgtcgggccactgcgcggcgcgcacggcaatcagcgcggcaagcgtgtcgaacacttcgggttccgtgcgcgcgttcatttgccgaccctcgcgaagtagtcgcccagcaggtccgcttcatcgggcacgtgctcggcgatgggcacggcgatgcgggtgatattcaggtattggcgccagccgaggttgtccgagaagttgttgccgccccaggtgccgcagcccatcgacaacgagaacggcaggccgttgtcgaaattcccgccggtggcgaagcagtgcgcctggttcacgatcacgcgcgccaccggcagctcttgtccaagctgcagcgcatggcgcgggttggacgaatgcaggctgaccgaatgcccggcgcccatataggcgtacaggctcgccacgcgctcgaccgccgccgcgaagtcggtcgcgcggtagagcgtcagcacgggcgagagcttctcgccggagaaggggtagtcgctgccgacaccggtttcctccaccagcagcatcgcgggctgcagcgcgcgcacgcgttccagcccggcgagctcggcaatgcgggtcgcgctctgtcccgtgaagctgccggcgagcttggcgtcgcgccacatcagcgcctgcagccgcgctttctccgaagccgtgagcagcacgccgccgaccgccgccaaggcgtcgagcatgggcgtgtagaccgcgtcgactacgaccaggctgttctccgaagagcaactggtggcattgtcgaaggtcttggagcgcgccaccttggctgccgcgtcatccagcgtggcgctggcgtcgatgatcgatgccacattgccggcgcccacgccgaaggccggcgtgccgcaggtgtaggccatgcgcacgttggcctgcgagccggtcgcgaccaccaggtcggcctgccgcatgagctccgccgtcgcggtcttcgagaccggcgcgggcagcatctggaccaggtcggcgggcaggccggcgcgcgcaaactcggcgtggatgaacgacagcagcagcgcgcaggtgtcctgccccttcggcgacggcgccaagatcacgctgttgccgcacttgagcgcgttgatgatcttgttggccggcgtggccgcaggattggtcgaaggcgtaatggccgccaccacgcccacgggccgcgcgatctcggtgatgccggctgccgcatcctgcgcgatcacgcccaccgtcctgcggccatgcaggtcgcgcagcaggcccagcgtcttgcggtggttcttgcggatcttgtcgtcgacattgcccagcccggtgtcggcgacggcacgctcggccaactggcggttgcgcgcgggctccatgatggcccacgcggcagcggcgactgccgtgtcgacggtggcctggtcggcacgcgcgaactcgcgctgcgcctgcctggcccgggccacgaccgcagcgacggcttcagccgcggcttgcgctggctgcacgggcagggatgccgtcggtaggggcaaatcggaattgttggactgccggcgatgcagtatttgcacactcatggattcgactccgcggtttggacggttagggccgccgcgctttgtcgtgcacttcgcggcaccgtcggcggccctggatcgaatctagtgaagccgggcagacaggccgtcccaatttgtgcgctttcgcgagcgcgcagccggggtgcgatcgagaattcagttttcgggacggccatgcgtcccggaatcctttaaatttgatccatgagcaatcattcgaatgccgccgccgtgcgcgccttccgcattctcgagatcctgtccgcggccgacggaccgctgtcgctggcggccatcgtgcaggcgatcgagctgccgaagcagaccgtccaccgcatcctcaagcagcttgaaagcacttggctggtgtcgcgcactgccggcaaccgccactacgagtgctcgtcgcgcgtgcggcagctggccgtcaatgtgctgatgcaggcaggtccggcggcggcgcgccatgcgatcctgcagcagctggtcgacaagatcggtgagacctgcaacctgaccatgctgtccggcgacgacgtggtctacctggaccgcgtggaaacgcaatggccgctgcgcatgcacctgcagccgggctcgcgggtgccgctgcactgcaccgccagcggcaagctgctgctggcgttcctgccgagcgcgcagcgccagcgcctggttgccagcctgccgctgcgcgcgcattcggcgcacaccattaccaatgccgaggccttgcacgcggaactggccgagacacggcagcggcgcctgggggtcaacaatcaggaaaacctggaaggcatgatcgcggtcgcggtgccggtgatgcgcaaccggagccgcgcctgcgcggcgattgccgtgcaggtgccgatggcgcgcatgacgatggaccagctgatgggattcgtgccggacctgcgcctggcagcggacgagatggtgaagacgttctgcgaataggccgtgagggcggtgtgctccctctcccgcaagcgggagagggagcacacgatcgcgcagcgagcgcccgttgttcaggccccgggagttgccggcgcggtcggatctacccccggcggcgtcacgttgaagcagccccggtacgtcgcatagaacgagcagtacaggatcgccagcatcagcagcgaatatggcgtgaccaggaacgacagcaccgtctccgcgccgaaggcgctgaacaccgcctccaggaagaacgggatcgccaccagcagcatcgcgaacagcaccgcgtaggtgaggaaggcgccgcggttgcgccagcacgcggtccagctgaagaacagtgccttgaccggcggcacgccgtgccaggctgccagcagcggcgcgaaccagaacatcatcgcgatcggcgtgtacagcagcgcgccgatcagcatggcgtagtacagctggcgcaccgcttcggcggtcggcgcttcttccttcagcacgatcggcaccagcgcgctcatgtcgaccaccgagccggcgatcagccccagcatgaacaccagcccggcgtagatgccgcccagcaccagcaggttgcgcgtggcttccttgccgttggcgcggaaacccgccagcagcacggtgggcatcacccgcttgttctggatcacgtcgcggcatgcggtcatcacgccaaccgacaggccgggggtgaccaccagcagcgcgatgatgccgatcagcggcaccacgatggccagctgcgcggcgatcaggtagacgaacagcagcatcaggaaggtcagcgggttcttgcggaacagccagatgccctggcggaaccaggtgtagccttccttggcagggacttccagtagttgcatacggatcagatccaggggagcggggcgcttgcagggtccgcgccgatgcgccggcgcaggatgcgttcgaaatgggtcgggtcgtgcggttgcagcatgtcggcctcgcgcggcaggtagaagtcccacagtcgcgatacccagaagcgcagcgcacccgcgcgcagcatgtcctgccagtgcgcggcctcggtggcggtcagcggcctcacggcatgataagcccgcagcagggcctgcgtgcgcgcggggtcgagttcgccgctggccaggtcgatgcaccagtcgttgacggtgactgccacatcgaacagccacttgtcgttgccggcgaagtagaagtcgaaaaagccgcccaggcggtggcgtccgctgccgtcttcctcgaacagcgcgttgtcgcggaacaggtcgcagtggcacgggcccgagcccaggccggcgtagtccgtgctggcgaagaaggcggcctggtgggcgatctcctgctgcagcagcgcgcgctggccggcatccaggaagggcaggatctcaggctcggtctgccgccaccagggcaggctgcgcaggttgggctgctggcgcggatagtcctggccggccaggtgcatgcgtgccagcatgtcgcccacttcagcgcagtgctgcgcgtcgggcgccagttgcgatgcgcccggcaggcgcgtgacgatggtggcgggcttgcccttgagcgggcgcaggatctcgccgtcgcgtgccgggatcggcgcgggcacgcggatgccgcgctcggccaggtgcgccatcaggtgcaggtagtacggcagctgcgcgaacgtgagccgctcgaaaatggtcagcacatactggcgcgtctggccatcgtgctccgtggtgaggaagaaattgctgttctcgatgcccgaggcgatgccgcgcagctcgcgcacttcgccaaggttgaaatccagcagccagcgggcgatctcgtcctgcgagaccgtggtgaatacggccatactcgttgtgtgaagcgaatcggaaagcggcgggcaccggttccggacaaagtccgggccgccgccgcggcatgacactgccggagggccggcgcggcctggggcttacgccaggccgtgggcaagcgaactcagaacttcaggttgaccgaaggcacgcggttgacatcgtgctcgcggatcttgggcgagctgtcttccggcttgctcatctcgtatttagtgccgaaacccgacctgacctggatatcggtggcccgtcccttgtcgcggtactcgcgcacctgggtgccatcgcgttcattgagctggaagctcggctggcgcggctggttcagttgcgacttggccgtcggggcgatcggctggttgttgatctggttcagctcctgctgcgtcagcgcattgctttcctgcgcgacggcccagccggaagccagcgccagcgcggcggcggccacggcggcgaggctggacacggaccgcctggcaggcgattcaggctcgccggccacggcggaagaccgcgtgggccggaccgagcgggcggtggagggggaggtcatcaggtgctcctgtgcggggctgcggcgcagcttgcgcgcaaccccgcggcatgcggcggttggactgcaacccggcggcgccgggcttggcagacggacaggttccattctagcaattcctgccgtgcgcaggccgctgccgtgccccggggggcacctgcgcaacgggcgccgggtgccgggtacgtggcttggcgccgcgcgccccggcgtccatgccttacaggtaaaacatctcttccttgggcggaatcggcttgtcgccgccgcgctgctcgtagtagtcgtagaccgcttccagcacttcgtgcggttcgtcgacgatcttcatcaggtccaggtcgtgctcggcgatcaggcccatcggcagcagcgtgaagcggaaccagtccagcaggcccttccagaagcggctgccgaacatgatcaccggcaccgagcgcgacttgccggtctgcaccagcgtcagcacctcggccagctcgtcgagcgtgccgaagccgcccggcatcacgataaaggcgtccgaattcttgacgaaggtgaccttgcgcgtgaagaagtggcgaaagcgcatggcaatgtcctggtacggattgccctgctgctcgtgcggcagttcgatgttcaggccgacgctggcggacttgccggcatgcgcgcccttgttggccgcttccatgatgccggggccgccgccggagatcacggcaaagccggcgtccgaaaacagccgggcgatctcgatggtgcgctggtagtacggcgaatcctcgcgcaggcgcgcgctgccgtagatcgacacggccgggcggatctcggagaggtactcggtggcctcgatgaactctgccataatcgtgaacatttgccacgaggcgcgcgccttctttgcggtagcgcggtcttcgtcggccagcgcacgcaggctggggatcatcttgcgcggattggcgcgcgcggccgcagcagcggccttttcagcagcaacttcgggcggattgcccgcggcagcagcatcggccgccgcggcgatggccgcggcgtgctcggaagcagcctccggcgggggttgtacggtatcgccggaaatgtcggaaacatccgggtcagcaaggggggcggtcgaggcaccgcctgcagcggcaccagtcaattttgagtccatgggaatgtcggatagtccaaaaacactcttgctcgtcgatggatcgagctatctgtatcgcgcttatcacgctctgccggacctgaggaatggggagggtctgcccacaggggcaatctacggcatgatcaacatgctgcgcaagttgcgcaacgactacccggcagagtatagcgcctgcgtgttcgacgccaagggcaagaccttccgcgacgacatgtatccggcctacaaggaacatcgcccgtcgatgccggaagacctggcgcgccagatcgagccgatccatgaggccgtgcgcgccatgggctggccgatcgtggtggttgatggcgtggaggccgacgacgtgatcggcacgctgtcgcgccaggccacggagcagggcgtgcgcacggtggtgtccaccggcgacaaggacctggcgcagctggtcaacgaccaggtcacgctggtcaacaccatgagcggcgaggtgctcgatccccctggcgtggttgccaagttcggcgtgccgcccgagcgcatcatcgactacctgtcgctgatcggtgatgcggtcgacaacgtgccgggcgtgcccaaggtgggccccaagaccgcggtcaaatggctggccgagcatggctcgctcgacggcgtgatcgccgccgcccccggcatcaagggcgtggtcggcgagaacctgcgcaatacgctggactggctgccgatggcgcgccagctggtcacggtcaagaccgactgcgacctctccgccgcggtggcggacttccacgcgctgcgcgaaacgggcgaggacaaggacaagctggtggcgtttttctcgcgctacggcttcaagacctggctgcgcgaagcgaccggcgaaagcctgcccgatgcccgcgcccaggcccgcgcccgcgcggccgccgcgccggcgcaaggcggcctgttcgatgtgccggccacggccggcgcagccgaggcaccggcagcggaccaggccgcgccgaccgagatccgctacgacacggtcagcaccgaagcccagctggaagactggatgcggcgcatcgaggccgcgccgctggtggccatcgacaccgagaccacctcgctggacccgatgcaggcgcagctggtcggcatctcgctgtcggtcgagccgggcgtagcctgctatatcccggtggcgcaccgtggcccggacgtggccgggctgcccgaccacggccagctgtcgcgcgagttcgtgctggggcgcatgcgcgcatggctggaagatgccagccgcccgaagctgggccagaacctcaagtacgacgtccatgtctttgccaaccatggcgtgaagctgcgcggcgtggcgcacgacaccatgctgcagagctacgtgctggcctcgcatcgcaaccatggcatggacagcctggccgagcgcctgctgagcctgaagaccatcacctatgaagaggtgtgcggcaagggcgccagccagatcggcttcgaccagatcgacctggcgcgcgccaccgaatacgctgccgaagacgctgacgtgaccctgcgcctgcaccgcaagatgttcccgcaggtggaagccgcggcgggcctgcgccgcgtgtatgaagagatcgagatgccggtctcggtggtgctgcagaaggtcgagcgcaacggcgtgctgatcgatgccgaacgcctggccgcgcagagcgccgagctgggccagcgcatgctggcgctggagcaggccgcctacgaggccgccggccagcccttcaacctgggctcgcccaagcagatcggcgagatcctgttcagccagatgaagctgccggtggtgaagaagaccgccagcggcgcgccctcgaccgacgaagaggtgctgcagaagctggccgaggactacccgctgcccaagcttctgctggactaccgcggcctggccaagctcaagtccacctataccgacaagctgcccaagatggtcaacccgcagaccggccgcgtgcacaccagctacggccaggccaccgcggtgaccggccggctggcgtcgaccgagcccaacctgcagaacatcccggtgcgcaccgaggagggccgccgcatccgcgaagcctttatcgccgagcccggcagcgtgatcgtgtcggccgactactcgcagatcgagctgcgcatcatggcccatatctcgggcgacgagaacctgctgcgcgcctttgccaacggcgaggacatccaccgcgccacggccggcgagatcttcggcgtggagcgcgaggccgtcagcagcgagcagcgccgctacgccaaggtgatcaacttcggcctgatctacggcatgagcgcgttcggcctggccggcaacctgggtatcgagcgcgaggccgcaaagcactacatcgaccgttatttcatgcgctacccgggcgtggcccactacatggaagagacccggcagaccgcgcgcgagcaaggctatgtcgagaccgtgttcggccgccggctgtggctgcccgacatcaacggcggcagcggcccgcgccggcaggccgccgagcgcgccgccatcaacgcgccgatgcagggcaccgccgccgacctgatcaagctgtcgatgatcgcggtgcagggctggctggagcgcgacgggctgcagacgcgccagatcatgcaggtgcacgatgaactggtgctggaggtgccggagcatgagctggagctggtcaaggtgcggctgccggagctgatgtgctcggtggcgcagctgcgcgtgccgctggtggccgaagtgggcagcggcgccaactgggaagaagcgcactgacgaggccgcctgtcagccagcctgcgccgcccatgcgttgtggtatcgaatgaagcgactgccgagtcaggcttaccggcttgccagttatgctgcaatgcagcagactgtggcaaacgcctcaggcaagaatttacaaaaacgcatcaggtagaccatgacagaaacaaggacgcctcgcatcgttgtcgtcggtgggggagcaggggggctggaactggtaacgaagctgggcgacaagctcggccgcaaggggcaggcgcaggtggtgctggtggaccgcctgcccacccacatctggaagccgctgctgcatgaagtggcagccggcagcatggaccccaacacgcaccagctggaatacgcggcgcaggcgcgctggcatcacttcgagttccagctgggcgagctgaccggcatcgaccgcatccgcaagaccatctcggtgtcggccagcttcgacgaggacggcgccgaactgctgccggcgcgcgagctgccctatgacacgctggtgctggcgatcggctgcgtcacgcatttcttcggcgtgcccggcgcggccgagaatgccatcgcactggacgtcgtggcgcaggccgagcgcttccgcaagcgcctgatcgcggcctgcgtgcgggcccagaactggcgcgggcgcgtgggcgcggacggccggccgcgcgttgacgtggccatcattggcgcgggcgccaccggcgtggagctgtcggccgaactgcgcaacaccgcgcacgtgctcagcgcctacggcctgcaccagcttgatccgcgccgcgatgtgcatatccacgtgatcgaggccggcccgcgcatcctgccggcgctgtccgagcgggtctcggtcgagaccgccaagctgctgaagaagctcgacgtcgatgtcctgaccagcgagcgcgtgaccgaggtcacgccgcaggcggtgctgaccgccagcggcaagcatatcgatgccgacctgacagtatgggcggcgggcatcaccgcgccgccggtgctggccacactggggctgccggtcagccgccagggccagatcgtggtcggcccgacgctgcagagcgagggcgacccggacatcttcgccttcggcgactgcgccagctgcccgtgggccgagaagcagaccacggtgccgccgcgcgcacaggccgcgcaccagcaggccaccttcctctacagcgcgctgcgcgcgcggctggacgggcgcccgctgccgtcgttcgccttcaaggatctcggctcgctggtgtcgctggggcatttcagcgcagtgggcagcctgatgggcgggctgatcggcggctcgatgttcatcgaagggctgatggcgcgcgtcatgtacacgtcgctgtaccggatgcatgtgatggcgttgcacggcgccgtgggcatggcgctggacacggtttcgcactggctgcgccgcaagaccagcccgcgcgtcaagctgcactgacgcgcgccgggccggggcttcccgcgctgcaccatgccgcgcgggccggtggcgtgcgggggtggctgcaaggccgccccatgttttctccatgtctgcttaaaatctgccgctggcgccgcatcccggcccagccaccaacgatcctggagacacgcatgctcaaaccggaagtggatagcctcgtccccggccagacgttcgaccgccgcggctttgtcaagacggcgctgggttccgcctttgcggcggccgcgctgccggtgatggcccagcaggccatcaagaccgactttgccggcctgagcgccggcgaggtcaccatcccctcgggcggcttcagcatgccggcctaccgcgcccagcccgaaggcaagaagaacctgccggtggtgctggtggtcagcgagatcttcggcgtgcacgagcatatcgccgacgtgtgccggcgctttgccaagctgggctacctggcgatcgggccggaactgttcgcgcgccagggcgatccgcagagcttcggcaccatccaggagctgcagcgcgaggtgattgccaaggtgcctgacgcgcaggtgatgggcgacctggacgccgcggtggcctgggccggtgccaacggcggcgacgtgtcgcgcctggccatcaccggcttctgctggggcgggcgcatgacctggctctatgcagcgcacagcaagcgcctgaaggccggcgtggcctggtatggccagctggcgcccgagccgaccccgctcaagccgaagaatcccatcgacctggtcggccagctccatgccccggtactcggcctgtatggcggcaaggacaccggcatcccgcaggagcaggtggagaggatgaagtccgcgctggcggcgtcgtccgacccggacgccaaggcctcgcgctttatcgtctaccccgagtccggccatgccttccatgccgattaccggcccagctaccgtgaagccgatgccagggatggctggcagaagtgcctggactggttcaggcagcacggcgtgtcctgatccggccgtcccggcgccgcgaggcgcctctcgcccgacagcaggattgcaaagtcccggcggatacgtacaatgcggcctttgagttattgcaacattgttgcgttagccgcccggcgcgatgcgggcggaacggcggggccgcccggtaccgccaccccgggagcccatcatccattcgacgcttttgtatatcctgctcgccgccacgatctcgggggtgggcagcatcttcggggcggcgctgctgtcgctgacggtggcgtcccgcgtggtcgagcgcatggtgagcttttcagtgggcgtgctgctggccaccgcgctgctgcattcgctgcccgaggcgttcgagtccggcgccgacccgcgcgcgctgttcggcacgctgctggcggggctgctcggcttcttcctgctggaaaagatctcgctgctgcgtcactcgcaccaccacgagggcgacgggcaccaccaccaccacggccatgaccgcgaggaagcggggcgcagcggcctgaccatcctggtcggcgacaccttccacaattttgccgacggcatcgtgatcgcggcggccttcctggccgatccgcatatcggcgtggtcaccgcgctggcgatcgcggcgcacgagatcccgcaggaagtcggcgacttcatcgtgctgctcaatgccggcttctccaaggcccgtgcctttgccttcaacctgctgtcgagcctggcggccatcgccggcggcgtggtcgggtatttcctgctcgaccagctgagcggctggattccgtacgtgctggtgattgccgccagcagcttcctctatatcgcggtcagcgacctgatgccccagatgcagcgcaagccgcgctggcgcgagtcggcgatccaggtggtgctggtggccgcgggcatctcggcgatcgtcttcatcaccaacggcgtgcacgagagccacagccacggcgggcacggccatattgcgcccgccgcgcccattgcctcgtcacgctgacttcaggcggccccggtagcgaccgggcgcgccggatcggcgcaccattcgctccatgatcccgggtacagcgccgcgccgcccaggccggccgcttccagcgccagcaggttgtggcaggccgtgacaccggagccgcactgcatcactgcctgcgccggggcgcgcgcacccagcactgcgccgaattccgcgcgcagggtctcggccggcttgaagcggccgtccgcgcccaggttgtccttgaagaagcggttgaccgcgccggggatatggccgccaaccgggtccagcgtctcgttctcgccgcggaagcggtcgggcgcgcgcgcatccaccaccagcagcgaggcgcgctcgaggttgtccaccagcgcggcggcgtcgacggtcggcgccagcgacttgcggcgttggaacttgccgggcaattccggctcttccgtggcatcgtgttcgagcggcaggccggccttgacccaggcgtccttgccgccgtcgagcacggccacggcatcgtggccgagccagcgcaacagccaccacagccgcgcggcgaacatgccgccctgcgcatcgtaggccactaccggggtgtcgtcgtccacgcccagcgcctgcaggcgcgccaccaggtcgtcggcgtcgggcagggggtggcggccgttgctgccggtcttggggccggacagctcgttgtccaggtgcaggtagaaggcgccgggcaggtggccggtgcggtaggcctcgcggccggcggccgggtcggccaggtcgaagctgcagtcgatcacgacgcagccgccgggggtggccagcagcgattgcagcgcggtgacggaaatcagcggtttctgcatgggaatcctgttgcgatcgatggaaaggggtctagttcaccaggggatgctacacctcgggatggacttccgcctccggcgacttgaccggcgtggccggcgtgggcttggcatcggtgccctggcgcgcgcgcatcagcgtggtggcgatgccgctggcgatgatcagccccatgcccagccacgacagccagttcagccggtcggaccagatcagcatgccccacacgctggaaaagacgatgccggcgtattgcaggttggcggtcagcagcgtgttgccgcgcttgtaggcgcgcgtcatcgcggtctggcccagcgtggccaggatgccgatggccagcagcaggccggcgccgtaccaggtatgcgcgctgacgccgcccagcagcatccacaccagcccggcgatcatgccgaccagcgagaaatagaacacgatgcggccctcgggctcgcccagctggccgagctggcgcacctcgacataggccagcgccgtgaacatgcccgagatcagtccgaccaggccgccggtcagctggtccttgccgaccgaaggctgcagcaggcagatcacgccggcaaaggacagcaggatcgccagcaccaggcgccggtcggcattgccgccggtgccggccagcgccgcgccggcgcccaggatcagcgcgatccacaccggcgacatgtagttcagcgtcatcgcggtggccagcggcagcagcgagatcgaggtgaaccacagcatcagcgcggtcacgccgaacacgctgcgcttgatgtgcgacagcatgtagggcgtgcgcaccgggatcccgcgcgaggacagcagcacccacatgatgaccacgctgatcaggccgcggtagaagacgatctcgccggtggtgtagagatcggatgccagcttgacgccaacccccatcaacgagaaggcgaaggcggcgaacagcatccagagcgattgcatggcgaggggcgcggtgaagcgaaacgaagcgggaaggagaggcgtccggcgcgcgggcgggcttcgtgtccggcctcgcgtcgcgcaagcggtgtggctgccggcaccggacaatgattctagcagcgcacttcgcgtcccaaaggaaaacggaccgccaggggcggtccgttcttgcgtgcgttgtgcggttatcgcactagtccgccggactagccggcgtaagccatggcgcggcgataccactcatggaaatgctgcatgccgtcttccatcggcgactggtacggcccgacttcgctggtgccgcgcttgagcagcgccagccggccggcatccatgcgttcggcgatctcgtcgtcctcgatgcaggtttccatgtaggcggcgcgctcggcctcgacgaactcgcgctcgaacagcgcgatttcctcggggtagtagaactccaccacattgcgcgtcttgcgcgggccgaccgggtgcagcgtcgagatcaccagcacgttggggtaccactccaccatgatgttggggtagtaggtcagccagatcgcgccgtgcttgggcagcacgccgtcgttgaagcgcagcaccgcgtcgtgccatttctggtaggtcgggctgccggggcgcttcaggccggcatgcaggcccacggtctgcacgctgtgccactcgccgaactcccacttgaggtcgtcgcacgagacgaagctgcccagccccgggtggaacggcaccacgtggtagtcctccaggtagacctcgataaaggtcttccagttgtagtcgcactcgtgcacctcgacgtggtccagcatgtagccgtcgaagttcaggtcctgggccacgcccagcctggccaggtcggcgcgcacgtcgcgcttgccgtcgaacagcagcccgttccagttctgcagcggcgagcgcttcaggtgcaggcagggttgcttgtcgaaatgcggcgcgccgagcagctcgcccttcaggtcgtaggtccagcggtgcagggggcagacgatgttctgcgcattgccgcggccgttgagcatgatggcctggcggtggcggcagacgttggacatcagttcgatgccggcggcgttgcgtaccagcatgcggccttcgtcctctgccctgagcgtgtggtagtcgccgacttccggaaccatcagctcgtggccgatatagcccgggccattcctgaacagcagttcgagttcttgttgatgcagcgcttcgtcgaaatagacgccgacgggcagttgcgaatcagccggcgccaggttgagcgcggtgctgagattggacattatccccactcccagatgaacaggtgaaagcagtgaacaacccaaccatcgaaaattgaatcgatttgggaaagacttccgccaggtcggcaaggtccggtagccccctggcggcgagggggagattgtacccgacccaaaaagttaagggactgatttttttgcctttttagcgaaaaagtcgacccgggtcgtcatcggggtgccgtaccgggcgcattcggaaagacgacccgagcgcacaagtcacttctgtggtttgtgcaccccgataggtccacgccgaccgtgcgcaaggatggggcaagctcccgctttggcgtaaaatccgggcttccccatccgggtttcccccggggtccttgattccaggtcctgatatgccaaaaacgacgaccgctccggtccagaccgacaacaccgccgacaccagcgcatcggcgccgcccgcttcctacgaagcggcgatggccgagctggaaacgctggtggccagcatggaaagcggcgaactgccgctggaggcatcgctggcggcctaccgccgcggcgccgagctggtgcgctactgccagcagaagctggagcgggtcgagcagcaggtccgcgtgctggaaggtgacgtgctcaagccgctggccggcgagggcaatggcgccaacggtgcactgggggcggacgaggcatgagtgactttgcccaatggatgcaggcccagggcgcccgtaccgaggccgccctgcaggcggcgctgcccgctgccgagaccgtgccgcatacgctgcacgaagccatgcgctatgctgcactgagcggcggcaagcgcgtgcggccgctgctggtgcatgccgccggcgaggtcagcggggcggctccggccgcctgcgacgcggcggcctgtgcggtggagatgatccacgcctattcgctggtgcacgacgacatgccctgcatggacgacgacgacctgcgccgcggccggcccaccgtgcacaaggcctatgacgaggccaccgcattgctggttggcgacgcgctgcagacccaggcctttatcgtgctggccggtgccggggcgatcgcgcccgcggcgcggctgcagctggtggccgagctggcgctggcgtcgggctcgaccggaatggccggcggccaggcgatcgacctgcagaacgtgggccgcgccatgacgcgcgaggcgctcgaggccatgcatcgcatgaagaccggcgcgctgttgcgcgccagtgtgcgcatgggtgcgctatgtggtgaaatcgacgccgagggcctggccgcgctggatcgctatgcggcggcagtgggattggcgttccaggtggttgacgatattctggacgtcactgccgataccgccacgctgggcaagaccgccggcaaggacgccgcccatgacaagccgacctatgtgtcgctgatggggcttgacccggcacgcgcactggccgggacgctgcgcgccgacgcacacgaggcgctggccggctttggcgagcgcgcggaccgcctgcgggacctggcggacctgatcgtgctgcgcacacactaaacagagagccggccgaacggacatcatgacctacgcactcctcaacaagattgacgcccccgcagacctgcgcaagctcgaccggcgtgagctccggaccctggcggacgaactgcgcgcctatgtgctggagtcggtctcgcagaccggcggccacctgtcgtccaacttgggcacggtcgagctgaccatcgcgctgcactacgtcttcaacaccccggacgaccggctggtgtgggacgtgggccaccagagctacccgcacaagatcctgaccggacgccgcgagcgcatgggcacgctgcgccagtggggcggcatctctggcttcccgcgccgcagcgagagcgaatacgacaccttcggcacggcgcattcgtcgacctcgatctcggccgcgctgggcatggcgctcggtgcgcgcacgctgggcgagaagcgcgtctcggtggcggtgatcggcgacggcgccatgaccgcgggcatggccttcgaggccctgaacaacgccggcgtctacaaggacctgccgctggtggtggtgctcaacgacaacgacatgtcgatctcgccgccggtgggcgcgctcaaccgccacctggcgcggctcttgagcggccagttctacgcggccaccaagaagggcatcgagaaggtcctgtcggtggcgccgccggtgctggagttcgccaagcgcttcgaggaacatgccaagggcatgatggtgccggccacgctgttcgaggaattcggcttcaactacatcggcccgatcgacggccacgacctgaactcgctggtgccgacgctgcagaatatccgcgagcgcgcgctcgagggcgccggcccgcagttcctgcacgtggtgaccaagaagggccagggctacaagctggccgaggccgacccgatcctctaccacggcccgggcaaattcaacccggccgagggcatccgcccggcggccaagccagcgcgcaagacctacacgcaggtgttcggcgactggctgtgcgacatggccgcagccgacaagcgcctggtcggcattacgccggcgatgcgcgagggctcgggcatggtcgagttcgagcggcgcttcccggaccgctactacgacgtgggcatcgccgagcagcacgccgtgacctttgccggcggcctggcctgcgagggtctcaagccggtggtggcgatctactcgaccttcctgcagcgcggctacgaccagctgatccacgacgtggcgctgcagaacctgccggtggtgttcgcgctggaccgtgccggcctggtcggcgccgacggcgccacgcacgcgggtgcctacgatatcgcctacctgcgctgcatccccaacatgatggtgatgacgccgtccgacgagaacgagtgccgtcagctgctgaccacggcgttccaccaggcgtgcccgagcgccgtgcgctatccgcgcggctccggcccgggcgcggccattgccgccgagctcaccactgtgccggtcggcaagggcgtgatgcgccgcgagggaggtgcgcgcgcggggcatcgcgtgggcttcctggcgttcggctcgatggtgcacccggccctgggtgccgccgaggcgctggatgccgcggtcgccgacatgcgtttcgtcaagccgctcgacgtggagctggtcaagcgcctggccgcggagaacgactacctggtgaccgtggaagagggcagcgtgatgggcggcgccggcagcgccgtgctggaggcactggccgaggccggcatcgacaagccggtgctgacgctgggcctgcccgaccgcttcgtcgaccacggcgacccggcctatctgctgcagcaatgcggcctggatgcggccggcatcgagcgctcggtgcgcgagcgcttcgggctggaccagcccaaggtcacggtcgcctcgcgcgtggcctgatcacctgctgtcccgaaggggattcggccctcgcaccacgagtgcgtccgaattcccttaaactccccttttttgtgttcgcagctgcgggccggcgtgccacttgccggatcccgtggtttcacactcgttgcgcggcatggatggactgcgaaattgccgcgaccgtaagggctcgtgccgtcccccttgggcgcgaccctggaggaaaccgtagatgaatgacatcaatcccgccttcgtcatgcccgacgtccagtcgagccccgacacccgccagatccccatccagcgtgtcggtgtcaaaggcgtgcgttaccccgtgaccctgaagaccccggccggcatcatgccgagcgtgggcaccttcaatctcgacgtgcacctgccggcggaccagaagggcacgcatatgtcgcgcttcgtcgcgctgctggaagaagagcgcgcaccgctggagctgtccagcttccggctgatgctggacaagatgctggaaaagctggaagccgaggccggccgcatcgaggtcaccttcccgtacttcatcagcaagaccgcgcctgtgtcgggcgtggagtcgctgctggactacgaggtcacgctgaccggcgaagtgcgcgacggcgccgcgcgcgtgttcctgaaggcgctggtgccggtgaccagcctgtgcccgtgctcgaagaagatctcgcagtacggcgcgcacaaccagcgttcgcatatcaccatgaacgtggaactggccggcgagctgccggtggaagcgctggtgcgcatggccgaggaagaggcctcgtgcgagctgtggggcctgctcaagcgccccgacgagaagttcgtcaccgagcgcgcctatgagaaccccaagttcgtcgaggacctggtgcgcgatatcgccatgcgcctgaatgcggatgatcgcatcgtggcctatgtgctggaggcggagaactttgagtcgatccacaaccacagcgcgtatgcggtgatcgagcgggacaagcgggtcgactgaccgcgttgtcgctgcaatagaaatagccaccgcatgcggtggctattttttggtccggttcaggccgccgaaggcaggcggatatccgccaggtcccagcgcggcgtcacgccgtagccatactcgtgccgcgccagttcgggcgcggcctgcaggcgcatggcgccggcaaacgcgatcatcgcgccgttgtcggtgcagaacgccaaatccgggtaatacacgtcgatcttgcgctgcttgcccatctggtccagccgctcgcgcaactggcggttggcacccacgcctcccgccaccaccagccgcttgtggccggtctgcttgagcgctgccatcgacttggcggccagcacgtcgacaatggcatcgacaaaggcgcgcgccaggttggcgcgatcctgctcgcaggtgttggcgagcttgcgtgtttgcgtcagtaccgcggtcttcagtccggcgaaggagaaatccaggttgcccgaatgcagcatcggccgcggcagcgcaaaggcgccggggataccgaattcggccagccgcgacacttcggggccgcccggatagcccaggcccagcagcttggcggtcttgtcgaaggcttcgccggcggcgtcgtccagggtttcgcccagcagcgtgtagtcgccgatgccgcgcacttccatcaactgcgtatgcccgcccgacaccagcagcgccacgaacgggaagggcggcggctcgcgcgtcagcagcggcgacagcaggtggccttccaggtggtgcacgcccaccatcggcacgttcagcgcaaagcccagtgcattggccaccgaggcgcccaccagcagtgcgccggccagcccggggccctgggtgaaggcgatggcgtcgatgtcctggcgggtacggccggcatcggccagcacctgctccagcagcggcagcacgcggcggatatggtcgcgcgacgccagttccggcaccacgccgccgtagtcgcggtgcatggcgatctgcgagtgcagcgcgtgcgcgagcaggccggcgccggtgtcatagagggcgaggccggtttcgtcgcaggaggattcgatgccgaggacaagcatggggagcgcatagggccgcctccggtcagggaaacggctgtcgaaacaacaggttgcaggaagcgcgcagggtagcacagcagcgcgcggcgtgcttttcgctacaatctgccctttctctggcggtggcaatacacatggatgcgcgaggcgtgcaatgagcggggcaacatcggcccggacgggccggtatgacgtggccgtgctgggtgcgggcgcggccggcatgatgtgtgccgccgtggccggccagaacggcgcgcgcgtggtgctgatcgaccatgccaccaagcttgccgagaagatccgcatctcgggcggcgggcgctgcaatttcaccaacctgcaggccgggccctccaactacctgtcgtccaatccgcacttctgccgctcggcgctggcgcgctacacgccgcaggatttccttggcctgatgcgccgctacggcatcgactggcacgagaaacatcgtggccagctgttctgcaacgacagcgccgaagacgtgatcgccatgctgcgcgccgaatgcgacaccggccatgtgcgctggcacaccggctgcagcgtggccgaggtccggcgcgagggcgacgacttcctgctgctcaccgctaccggcatggtgcgggccggggcgctggtggtggccaccggcggcctgtcgatccccaagatcggtgccaccgactttggctatcgcatcgcccggcagttcgggctgggcatcgtcgaaacccggccggcgctggtgccgctgaccttcgatggcaaggactgggtgccgttcgcgccgctggccggcgtgtcgctggaagtggatatcgccaccggcaacggcaaggcggccggagccttccgcgaagacctgctgtggacccatcgcggcctgtccggacccgccgtgctgcagatttccagctactggcgtcccggcacaccgatcgccatcgacctgtttgatggcgaggatgccgccgcctggctgctcgagcagaagaccggcagccgcaagcacctgggcaacctgctggcgcaacggttgccggcgcggctggccgatgcctggtgcgcggcctcgggcgtggatgccgccatgccgctgcatgatgtgaccgacaaggccctgcgcaagcttggcgccacgctcaacggctggcgcatcgtgccgtcgggcaccgagggctaccgcaaggccgaggtcacgcttggcggggtcgacacgcgggcgctgtcgtcaaccaccatgatggcgcgcgaggtgccgggcctgtatttcatcggcgaggtggtggacgtgaccggctggctgggcggctacaacttccagtgggcgtgggcgtccgcggtggcggcggggcaggccgcggctgaggcatcgcgcaccgcttcggcagggcaatcggtagcccaagggtagactggcgagagctggaagggcggtgggcggcactcggcaagtgtccgttgcacgccacttccgcgctcgattgttggtgctacaatccagaacttcgtagagccgcttatcccgaaaattctcattttctggccaaatgaccacgatccgtctcaaggaaaacgagccttttgaagttgccatgcgccgtttcaagcgcaccatcgagaagaacgggctgctcccggaattgcgggcacgcgagttttacgaaaagcccaccgccgcgcgcaagcgcaggaaggcagccgccgaaaagcgccattacaagcgcatccgcagccagatgctgccgaaaaaactgtactgaccccggcgctcccgcttgtatccgacccgctgtggcctacgcttcggcgggtttttgcattctgggccttgcagcgggcggtcatcgccgccacctgtgagtgtccacccactttctggaagatcacgatgtccctcaaagcccgtatcagcgaagacatgaagaccgccatgcgcgcgcgcgaaacggagcgcctcggcaccatccgcctgctgctggccgccatcaagcagcgcgaggtcgatgagcgcgtggaactggacgataccgccgtgctggccgtggtcgagaagctgatcaagcagcgcaaggattcgatctcgcagttccggcaggcgggccgcaatgacctggcagacaaggagtcggcggaagtcgaagtgctgcaggcctacatgcccgccgcgctgtcggacgaggaagtcgccgccgaggtccagcaggccgttgccgccactggtgccgccggtccgcaggacatgggcaaggtcatgggcgtgctcaagggcaagctggccggccgtgccgacatgaccgccgtatcggccctggtcaaggcggcacttgcagcaaagtaaatactgatttaatcggttgctggcaagataagcaccggatccgcgtggttcggtgcagttgcacggagatgtcacgtagtccgggcggccctatcacgctgcactacaatattccgatagcagccgggcgccgcaccggtcacgcattcctaaaagaagccgcccgccgcgggacggccatgcctcaggacggtcagtcgggtgattccgcaatcctttattcaggacctgctcaaccgtgtcgacattgtcgatgtggtgggcaagtatgtgcagctgaagaagggcggcgccaatttcatggggctgtgccccttccataacgagaaatcgccgtcattcacggtgtcgccgaccaagcagttctaccactgcttcggatgtggcgcccacggctcggccatcggcttcctgatggagttttccggccagtcctacccggaagcggtgcgcgagctggcccagtcggtcggcatgagcgtgccggaagagcgcgaccgtctgccgcccgggcagcgcgcggagcagcaggcccgttcggtggcgctgtccgacgccatgacccgcgccaccgatttctaccgccgccagctgcgaagcgcgccgcaggcgatccagtacctgaagggccgtggcctgaccggcgagatcgccgcgaactttggcctgggctacgcgccggatgactggcagggcctggaggccgtattcggcagctatcgtgatgacaacgtgtcggcgccgctggtcgagtgcggcctgctgatcgaaagcgacaagcgcgatgcggacggcaagccgcgccgctacgaccgcttccgcgaccgcatcatgttccctatccgcaacaccaagggggccgtgatcggcttcggcgggcgcgtgatggggcagggcgagcccaagtacctgaactcgcccgagactccgctgttcagcaagggcacggagctgtacgggctgttcgaggcccgtcacgcaatccgggaaaccggctacgtgctggtggtcgaagggtatatggacgtcgtggcgctggcccagctcggttttgccaatgccgttgccaccctgggcacggcgtgcacccctgtgcacgtgcagaagctgctgcgccagaccgacgccgtggtgttctcgttcgacggcgactctgccgggcgccgcgcggcccggcgcgcgctggaagcctgcctgccgcatgtggcggacaacaagaccatccgcttcctgttcctgccggccgagcatgatccggacagctatgtgcgcgaagagggcaccgaggcctttgccacccaggtgcgcaacgccatgccgctgtcgcgcttcctgctgcagtcggtcaccgaagacctggacctgcgccagcccgagggccgcgcccgggcccagtacgaggccaagccgctgctgcaggccatgcccgccggcggcctgaggctacagattgtgcgcgaacttgccgatgccacgggaacgacacccgcggagatcgaagccatctgcggcctgcgcagcgacccggcccgcgtcggccgcttcgcccagccgcgcccgcgcacgcgccgccaggccccgaccgggctggagcagcgggtgatccagctgctgatgtgctatccggcactgtcggcgaggctggacgaggatgcgcgcgcgctgctgctgggcggcgagagcagcgacagtgaagtgctggcgcacctggtggaggcgtgcgacagcgtgcagggcgaggtcaattttgcggccttcagcgaacacctggcccagtcgccctatgccgaggtgtatgccgtggcgcgtgccgcggtgctgcgagaagagatcgaagaggcacccgcaatacaggatttcgatgcggccattaccaagctgctggccgagccgctgcggcgcgagctcgacggcctgcaggcggaggtagtggccggcacggccgatgaagcggccaagcagcgcatgcgctggctggtgggcgaaatccaccggcggcgccaacttggctgaggtgcctgtgtgcgccctggtcatcaaccaggaggtggcagtaagcgttggataagggactgggcccggccccgccgagcttaagccttgatttttcaggtgaaaacctcacctgatagggagccggctatgcgtggcgtgctacaatagccggtttggattgcgaaatctttctctccagttctggtgaaagtgagcgtgccaatggcaaaggccaaagcaaccgaaagggttacctctaaagctccccaatcagggagcggcaaggcgtctgtgaaaacaacggcggcgaagacatcgaccgcgtcagtcaagacaccagcccggtctgcgccatcaaagtccgtgcgtagcgcgcaagcgcccgccgtgacgactcccgccaggactcgcacatccgaaaagacaaaggcctcgacttcggcacgcgagagcggcaagagcgccagtacgagcggcaaggtcgccgcatctgcaccagtgaaaggcaagagtatcaccgtggcgaaacagcagaataccgaagtcgagagcaagcgagcggcagccgccggcgccaagagtggggaagccaaggctggcaccaccactacggcaaccaaggcgcgtgccgcgacacctgcatccgttgcatccgagcgtcccgctgcgccggcaatcaagccggagccgaaaaagcgtggccgcaagcccaaggccgagatgcagcacgacgacagcacaacagacgacgtgactgaagagttttacgagaacgatgcgcgcccggcggcaaccccggccgcggcgccgaagaccgaaaagcagaaagccaaggaccgcaaggccaaggaaaaggccctgctcaaggagttcgcctcgacccagcagggtaccgaggaagagcttgagctgcgtcgccagaaactcaaggcgctgatcaagctgggcaagtcgcgcggctacctgacctacgcggaaatcaacgatcacctgccggacgacatggtcgattcggaaacgatcgacacgctggtcgccacgctgaacgacatcggcatcgctgtctacgaacaggcgccggatgccgagacgctgctgctcaacgacaacgccccgtccgccaccagcgaggaagaagccgaggaagaggccgaagcggccctgtccacggtggactccgagttcggccgcaccaccgacccggtgcgcatgtacatgcgcgaaatgggcacggtcgagctgctcacgcgcgaaggcgaaatcgagatcgccaagcgcatcgaggccggcctgaaggacatggtgatggcgatttcggcttgcccggtcaccatctccgagatcctggcccatgccgagcgcgtggccaacgacgagatcaagatcgacgaattcgtcgacggcctgatcgacccgaacgccgacgaagccccggaagcgcccgcagccccggctgcagcggccgacgacgaggatatcgagtccgacgacgaagaggaaggcgacgaggacgatgacgacgaaggcggcgccggcgccggtgcctccgcgcgccagctggaagaactgaagcagaacgcgctggagaaattccgcgtgatcgccgagcagttcgacaagatgcgccgcgcgttcgaaaaggaaggctacaactccaagccctacgtcaaggcgcaggaagccatccaggccgagctgatgggcatccgcttcaccgcccgcaatgtcgagcgcctgtgcgacacgctgcgcggccaggtcgacgaagtgcgcaagctcgaacgctcgatcctgaacatcgtggtcgacaagtgcggcatgccgcgctcggaattcgtcgcccgcttcccgggcaacgagaccaacctcgagtgggtccacaccatcgtcgccgacggcaagggctacagcaccatcgtcgagcgcaacgtgccggccgtgcatgagctgcagcagaagctgatcgacctgcagtcgcgcgtggtgctgccgctgaaggaactgaagggcgtcaaccgcaagatggccgagggcgagcgtcgtgcccgcgaagccaagcgcgagatgaccgaggccaacctgcgtctggtgatttcgatcgccaagaagtacacgaatcgcggcctgcagttcctcgacctgatccaggaaggcaacatcggcctgatgaaggcggtggacaagttcgaataccgccgcggctacaagttctcgacctacgccacgtggtggatccgccaggccatcacgcgctcgatcgccgaccaggcgcgcaccatccgtatcccggtgcacatgatcgagaccatcaacaagatgaaccgcatctcgcgccagatcctgcaggaaaccggcaacgagccggatccggcaacgctggccgagaagatggagatgccggaagacaagatccgcaagatcatgaagatcgccaaagagccgatctccatggaaacgccgatcggtgacgacgacgactcccatctgggcgacttcatcgaggacaccaacacgctggccccggccgaagccgcgctgcacggctccatgcgcgacgtcgtcaaggacgtgctggactcgctcacgccgcgcgaagccaaggtgctgcgcatgcgcttcggcatcgaaatgagcaccgaccacacgctggaagaggtcggcaagcagttcgacgtcacgcgtgaacggatccgccagatcgaggccaaggcactgcgcaagctgcgccacccgagccgctcggacaagctgaagagcttcctggaaggcaactaaacgcttccaagggcctctagctcatgcctggttagagcagcggactcataatccgttggtgccgtgttcgactcacgggaggcccaccaatgtgaaaaaggactgcaggttgatacctgcagtccttttttttgcctcgaactaccgctcaatcctgcgccgtcaccatccccatcgccggatcgctaaccgtatgcctgccgttctccacccgccccgcaaagcggcgatagaacgccgggtcgctgtcgcacgtcaccgcgaagtcataccactgcccgctttcctccagcgaccaatgcacggacttgctgtcattggcgccgacagtgaccggccacgggccatcggttcggtacgcgagcgcctggatgctgaagtggcaggccttgcggccggcgttgatcaggtcgacatagacgtcgccattggcaatgtcgtagcagacgcggatctccggtgcgatgccggtgtcgccgatgcggttggtatcgccgcggaaatggcggtggaagccgttggggcccagtacccacaggtcgtattgcccggcgttgtcctggaacacgttccaggtgtcgctcagggacttgcgggcttccacgacatagcggcgcggaatgcggcccagctggtagcggtcgtagacgtggaacaccgcggcttgcgtgccggtgttggcgaataccagttcgacctgccccacggcgctgcagcgcgcgctggtgtgcagctcgtacggcagcgcgcgtgacgggcgggtgccggtggcttgcagcggcaattgcatgtcgaccggcagcggcaccgcgggcagtgcctgctgggcctggcgcagctggtcggcgccgctgcgcgtggtgcggccactcagcgtgggcagggcttccgagttgggcgtcttgaagttgaacgcgctggtcaggtcgccgcagacggcacggcggaacgggctgatgttgggttcggccacgccgaaccgcgcttccaggaagcgcagcacggaggtgtggtcgaacacctgggaattgatccagccgccgcggctccacggcgagatcgcgtaaagcggcacgcgcggcccgggaccgtagacgcggccgtcagcagcgggctgggtccggctgcccggtggcggcggatggttgaagtattcggcctgcatctcggcatcgctcagcgtcgccttgccggccagcgtcttgtcggggttcaccgacggcgccgagggggaggggacgtggtcgaagtagccgtcgttctcgtcgaagttgaccagcagcacggtcttgctccagacctcgggcacggcggtcagcgcgtccagcacttcctgcaggaaccacgcgccctgaaccgggctggacgggccgggatgctcgcagtagatcgacggcgcattgatccacgatacctgcggcagcctgccttccttgatgtcgcggcggaaggcgtcgaggtattcctcgggtctggtgccgggcagggtgttggccacgcccttgtacagcggattggcggcattgtcggtggccgcatcgtaggcgtggtacggcagtggctggccggtgttggcatagggcgcgcccggcgcgccgccgctggataccggaaagcccgaggccaggttggccttgcggaactgctggaacgcgcccagcatgttgtcgccccattcgtccggcatgttctggtagcagatccaactgatgccggctgcttccagccgctcggcataggtcttccaggtgtagccggtgttggccgaggcgggcaggccgtcgatcgcgtcccactcattgttgacgaaggcgacgttggctgcggtcgggccgttggtgccggtcaggtggaatgaacggttcgcgtcagtgcccgtatgcatcgagcagtggtacgcgtcgcacagcgtaaacgcattggccagtgcgaactggaacgggatctccttctccttgaagtagcccatcgaggtattggtcttgtacgtcggccaactggccatgcggccgtggtcccaggcctgctggctgtccacccacgcatgcggcgtgccggccgcgcgctgcgcgttgttgttggtgccatccaggtgatacggggtcagcacggcgccgttggagcgctgttgctgccataccttgcgcgcattgggcagcgggatggtgaagcggtcgccgaacccgcgcacacccttgagcgtgccgaagtagtggtcgaaggaacggttctcctgcatcaggatcaccacatgctcgacatccttgatggtgccggtggcattgttggccgggatggccagggccttgcggatgctgggcgggaacgcggccagtgcggcggcggcgaagccggtgccggctgcggcttgcaggaagttgcggcgagagaccatggtcttgtcggatggcgtcgggacttgcgttgtcagggggcgcagcggatcacggggtcgggccgccggtccggcttcttgccgggctgttccggttgtgcgttcggcgtgacagtcgcactcggcgacaggttgccgccgccgtcatcgccaccgcatgcggtcagcaatgccgccgcgatcagggtcgcggccagggttcttggaagtttgcaggggagcatcgggttcgcctggctgggtgggtgtggcggctgctgggagccggagccaggcgagtgtaggaaggcggggtgacgtgtcgatgacagaatgtccaacgccgatcggtgccgtccgtcgggcggacggcaggcaggatggctacttccagaagcccgcgtgcggtgccgcggcttcgtcctcgagcaccggcccgaccacatccacctggcgctgcccgcgcgcgaacacttcgcggcaaggcagcgagagggtggggttctccgggtggtcgccggtcaggcccagcagcttgtgttctgacagcgcatagaccacgcgcccgatgccggtccagtagatcgcgccggcgcacatgcagcacggctccgcgctagtgtagagggtgcagtcggccagttgctccggcggcagcgcacgcgcggcctgcgcggcggcgaccagttcggcgtgctgggtcgggtcgccctccggcggcatcgagttgttgccggcgctggcgatgatattgccggcctggtcggccaccagcgcggcgaacggatggcggccgcgagccctggatgcatcggacagcgcgatcgactggcgcagcagttccaggtcgagcggcgacagttcagcgccggacgggtctgtgattcgggtcatgcttggggtctccggttgggaaagggatcagggcgtgctgcaggccgaagctcgccagctggcgcagcggcaggatttcatcgaccgggtgtaccggtgtcggggtcttcatgggcttgtctcctttttcgatggaagccgcttccgcctctggcagggcggattgggcagcgccggccgggattgccgggatttgtgatccctcggccgttgcggcatcatctccgcaacttcatcggtacaacaaatcaatacctatcgatccagtcgatgggtcgcgggagggtggccatgcgtttttcgctggaccagttgcaggtattcgcactggtggttgagacaggctccttttccgctgccgcgcggcgcctgggcaagacccagtccacggtcagtgcggcggtggccaacctggagatcgacctcggcgtgccgctgttcgaccgcagcagccgcaatccggcgctgaccggggccggccgcaagctgctgaccgaggccgaagccgtgctggagcgttgccggtcgctgcaggcccatgccgccagcctggccgatgccaacccgcccgggctgacgctggcgatcgaaatcccgtaccacgcggtgatgccggtgctggccgaattcgagcgggagtttccgtatgtcgacctgaccattcgcaatccggtctacggcgatgtcagcgaactggtgctgcagggcgaggccgagctcggcatcgccttcgcgcagccgcactacgcgccggaactggccttcgtgcagttgggcaagctgatcatggtgcatgtggtgcacccgggacacccgctggccgggcgcgaacaggtctcgtttgccgacctgcacgcctatcggcgcctggccttcagcgcgcatgccgacaagctgcccaccagcgaatacctgcgcgcggcgcgggtgtggcgcgccgaaagctacctggcgctggtcgaaatggtgaaaagcgggctgggctgggccacactgccgcggcaactggtgcgcgcggcgctggagcgcggcgaactggtggaactggacctggcggcctatccgtacacggactggctggtcagcgtcgacctgatctgggcgaagtcgggccggccgcagggccgggccgagcagtggctacggcagcgcttccgggaaaacatggtgttcgaggtcgaccggcgcgggcagcggaccacccgctgagggcgcggcgatggactatggtagtcatcgcgcgtttgatccgattcgcacgattcaatctgaccaggagtgaagcccatgtcctatatcgacggatttgtactggccgttccccaggccactcgcgagacctatcgccaggtggcgcagaaggcagccgcggtgttcaaggagcacggcgcgctgaaggtggtggaatgctggggtgacgatgtgccggaaggcaaggtcacgtcctttacgatggcggtgcagcgcaaggaggatgaggcggtggtgttctcgtggatcctgtggccgtcacgcgagaagcgcgacactggcatgaaggcggcgatggccgacccgcgcctgaaggaaggcatggatccgatgccgttcgacggccagcggatgatctttggcggcttcgaggtgattgtcgacgagtgagcgcgccgggcgccggcgtggcagcgccggcgcgcagcaagcgagttcagatcaggtggaagaccatgcccagggcaatcgcgccacccagggtttccactgctgcgagggcgagaaggttcttcagtacgaaagcgtcttctttcttcgtcaccatggtctgtctcccggtcattggacttgttctgaggcaccatcggctgcggcgatccggcgtttgcggtgccaggccgtcgatgtgagtccagtagaccgcatccggacgttggccggaagctggcgaaaacccgctcggcgaaaacccggattccttcaggaatgtgacagggccatgattgacaggcttcgcagggcgcgtttgcggcctgccggcaacgcggcatggcaatggcccacatttgggggatgtccgccgtggcgcgatgcgccaggatcaaggcgtgggtggtcgagcagattgccccgctaccatttgagccccgctgcctccccggcatgcggggcttttctacatgggccgcgggcgcctcagcgcgcctgcaggatggtttcgatgcgggcggcggcctcgcgcagcggccccaggaagcgcgtctccagctgggcctggtcgcggctgcccagcaccatgctgaagcccagcccggccaccggcttgccggcctggtcgcgcaacggcaccgagatcccggcgtagccgtccaccagctcgctcaccagcacacagtagccgtcggtgcgcacctgccgcagcgtgcgcgccagcgccgtgcgcgagctgaccgtgaacggcgtcagcttgcgcagcgtggcgcctgccaggtaggcctcgagcgcgtcatcgtccaggccggccagcagcacgcggccaagcgaatgcgcataggccggcatgcgccgtcccagcgccatgtccacgcgcagcagctggcgcggctcctcgcgcgccaccagcaccacggattccgcatcgagcacgcccaccgagcagctttcgcccagggactcgcacagcccctgcaggtagggccgcgccacctgcggcaggctcatcgaggcaaagtaggcatagccgagctctatcacccgcggcgtcagcgcaaagtggcggccgtcctgcgccacgtagccgttgtgctccagggtcagcagcagccggcgcgcggcggcgcgggtcacgtcgagctgctcggcgacgtcctgcatggtcaggcgttccgcgccgccggcgaacaggcgcagcagcgccaggcccttgctcagcgattccagcagttcgtctttcttggcggcttcggcttgcggcatttcggcttaatacggggaaatgaaggggagatcatatggttctccatgccgcgccggacttgcgccagcggccggcatgtccgtatgatagcgttttccgaacaaatgttcgcaaaacaaaattcacggaaaaacgtgccgccaccgatgcgggacggcacaacgaaaccggagacagcaatgaaggtgatcaccgcacgcgaagcggcggcactggtgcaggacggctggaccgtggccagcgcgggctttgtcggcgccggccatgccgaggccgtgaccgaggcgctggagcagcgcttcctgcagagcgggctgccgcgcgacctgacgctggtgtactcggccgggcagggcgaccgcggcgcgcgcggcgtgaaccacttcggcaatgccggcatgaccgccagcatcgtcggcggccactggcgctcggccacgcggctggccacgctggccatggccgagcagtgcgagggctacaacctgccgcagggcgtgctgacgcacctataccgcgccatcgccggcggcaagcccggcgtgatgaccaagatcggcctgcacaccttcgtcgacccgcgcaccgcgcaggatgcgcgctaccacggcggcgccgtcaacgagcgcgcgcgccaggccattgccgagggcaaggcatgctgggtcgatgcggtcgacttccgcggcgacgaatacctgttctacccgagcttcccgatccactgcgcgctgatccgctgcaccgcggccgacgcccgcggcaacctcagcacccatcgcgaagccttccaccatgagctgctggcgatggcgcaggcggcccacaactcgggcggcatcgtgatcgcgcaggtggaaagcctggtcgaccaccacgagatcctgcaggccatccacgtgcccggcatcctggtcgactacgtggtggtctgcgacaaccccgccaaccaccagatgacgtttgccgagtcctacaacccggcctacgtgacgccatggcaaggcgaggcagcggtggccgaagcggaagcggcgccggtggctgccggcccgctcgacgcgcgcaccatcgtgcagcgccgtgcggtgatggaactggcgcgccgtgcgccgcgcgtggtcaacctgggcgtgggcatgccggcagcggtcggcatgctggcgcaccaggccgggctggacggcttcacgctgaccgtcgaggccggccccatcggcggcacgcccgcggatggcctcagcttcggtgcctcggcctacccggaggcggtggtggatcagcccgcgcagttcgatttctacgagggcggcggcatcgacctggccatcctcggcctggccgagctggatggccacggcaacgtcaatgtcagcaagttcggcgaaggcgagggcgcatcgattgccggcgtcggcggctttatcaacatcacgcagagcgcgcgcgcggtggtgttcatgggcacgctgacggcgggcgggctggaagtccgcgccggcgacggcggcctgcagatcgtgcgcgaaggccgcgtgaagaagatcgtgcctgaggtgtcgcacctgagcttcaacgggccctatgtggcgtcgctcggcatcccggtgctgtacatcaccgagcgcgcggtgttcgagatgcgcgctggcgcagacggcgaagcccgcctcacgctggtcgagatcgcccccggcgtggacctgcagcgcgacgtgctcgaccagtgctcgacgcccatcgccgttgcgcaggacctgcgcgaaatggatgcgcggctgttccaggccgggcccctgcacctgtaatcctgtcattcgcggccggccgggcaagcaccgccgccatatgcatcagtcagacgggccggccatgaccggttcgcgaggaggctcgccacgatctgtcatgacattactgaaccgctgtcgcttcatcccggcgcggcactgagccgcgctcaggcgggctgctgcccttgcgcctggctggccggcagcgccggcaagggcagcgccggctggcaggcggccgcggccaggccaaggaactggctggaggtgcgcaggaactgctggcaggtctggcggaaaagctcgaagtccatgtaggtctcggtgagttggggtggcgcggtccggccgtggccgccgcgccgccggcatcttgcgtggtggatatgacagtttcttgaaatcccgccagcctgtgccgccatctgtcgcgccagtcgcacggcgctgccagaatgcccactgtgctggcagaggtgctaaaatgtaagtctttgattctcttggccaaatgctgcagccagcatggccgtgccggaaccctcccggcgccaggcgagagtcagggcgagatgagttccagacgcgtatccgtttgtgccgggttcgcctcccgccagacaccgatacccatgaccactacgaacgcaccagaagccactaccgcggggcagaccgccgtgcagacattcgacagctttggcctggacgcgcgcatcctgcgcgccttgtccgagcagggctacaccacgcccaccccgatccaggcacaggccatcccggtcgtgctgataggcaaggacatgatgggcgccgcgcagaccggcaccggcaagaccgcgggcttcgcgctgccgatcatccagcgcctgctgccgctggccaatgccagcgcctcgccggcgcgccacccggtgcgcgcgctgatgctgacccccacgcgcgaactggccgaccaggtctatgacaacgtcgcgcgctacgccaagcacaccgacctgcgcagcaccgtggtgttcggcggcgtcgacatgaacccgcagaccgacgccctgcgccgcggcgtggagatcctggtggcaacgcccggccgcctgctggaccacgtgcagcagaagtcggtcaacctgtcgcaggtgcagatgctggtgctggacgaagccgaccgcatgctcgacatgggcttcctgccggacctgcagcgcatcatcaacctgctgccggcgcatcgccagacgctgctgttctcggctacgttctcgccggaaatcaagcggcttgcctccagctacctgaagcacccggtcacgatcgaagtggcacgcagcaactcgaccaacgagaacgtgcgccagatggtgtacctggtcgaagacggccacaagcaggcggcggttgtgcacctgctcaagcagcgcgccgagcaggggctgtcgcgccagtgcatcgtcttcgtcaacagcaagatcggctgctcgcgcctggcgcgccatttggagcgcgagggcatcaacgccgccgccatccacggcgacaagacccagaccgagcgcatgcagacgctggaagggttcaagagcggcaccatcgacgcgctggtcgccaccgacgtggccgcgcgcgggctggatattcccgacatgccgtgcgtggtcaacttcgacgtgccgtacagtgccgaagactatgtgcaccgcatcggccgtaccggccgggccggcgccagcggcgatgcgctgtcgatctacgtgccgggcaatgacgagcgcctgctgtccgatatcgagaagctgatcaagcgcagcatcccgcgcggcaagctggaaggcttcgacccgaccggcgagcgcgcccgccagggcgataccgagcgccgccgcgagcgtagcgacgtgcgtcgcgcgcgcggcaacggcgagggcgaagagcgtccgcgccgccacgagcacagcgccaaccgccaggtgttccgtgcctcggatgatccgttcttctcgcgcccgtacgagcccagcgccgccagcgtcgcccaggccacggcggccgatgaagtggctgccgcgctgagccgcggccgccaggcgcccaagcggccggtggctgccctgctgggcggcgtgccgcgcaagtcctgatctgatcctgccgtagctgaaaatggcccgcctgcgcgggccatttgcttttggggggggcgctatccgtgcgggggtcgcggcagatcggccagcaactggcgccacccgtcggtggcgcgcgcaagccagtccttcacattttccgcgcggttcgacagccccaggtgagtgccggcttcgcgcagcgcgtccagcggtgcggtggtgtcgattgcctgcgcaccgctttgcttgctcagcttctcgccggtttcgttgaccaccactggcacgtgcaggtacgccggcgtgggcaggcccagcaggtgctgcaggtggatctggcgcggcgtggagtcgagcaggtcggcgccgcgcacgatatgcgtgatgccctgcaagccgtcatccaccactaccgccagttgatacgcccacagcccgtccgcgcggcgcagcacgaagtcgcccagctcggtttccaggtcctggcactggcggccctgccagcggtcgtcgaagcacagggtggcggccgggccgtccggcacgcgcacgcgccaggcgcgcggcagcttgccgttcaggccgtggcggcaggtgccgggatagcccagggtctggtgccgctcgcgcacgtgcaccagtgagtcggcgatctccttgcgcgaacagccgcacgggtagagctgcccggcggcgtcgaggcggcgcagcgcatcggcatagaacggctcacgccggctctgccataccggcggctcgtccggcgccatgcccaggcgttccagcgtgagcaggatgtcgtcgtccgcgccgcgcacgcagcgcggcatgtcgatgtcctcgatgcgcaccagccactggccgccgtgcgcgcgcgcgtccagccagctcgccagcgcggtgaccagcgagcccatatgcagcggcccggtgggcgagggggcgaagcggccgcgatagccggtcgcggcaaccgtcgttgctgccgtcgttgctgtcactgccatgagacctgccctcagccggcgaagtcgggttgctgcagcagtgcctgcgccaggcgcgggtcttccagcttgctggcccaccactgcagcgccttgccgcggttgctggtgcgccaggctaccttgaagttgccgggcgcgcgcacctcgacggtctcgcgcgcctgcagcacgccgctttcgatatggggttgcgccatcggcgccggcagccagccgcagcccagcccacggatctgtgcctcgagcttgtcgcgcatggtgggcaccaccagcacgtcttgcccggccagcacgccatgggtacgcgccggcaggttgcgcgaggtgtcgcccaccgcgacgatgcggtgcctggcgatctggatggtggtgagcgggccttcctcggtggccagcggatggtgcgcggcaaccgcgaacacgaacggcatcgagcccagtggccggatctggaagccctgcgtgctgggcgcatcgtaggcgccgccgatcaccaggtcggcgcggttgttgaccagcgcatcccaggcgccgcccagcacttccttggaaaagcgcagccgggtggcggtgttctcggcgtagaagtcgtggatcaccggcagcagcgcgcggaagttgatcaggtcgtcgaccacgatggtgagggtagcctcccagccggtggccaggcgcttgacgcgccgtgccaggtcatcggcggcatgcagcaggtggcggccctcatcgagcagggcgcgtccggccggcgtcagctcggcgcggtggcggcgccggtcgaacagcagcacgtccaggtcttcttccagcttgcgcaccacgtaggtcagcgcggaagggaccttgcccatctcgtgggcggcggcggcaaagctgcccttgcgttcgatggcgtcgaggacttcgagggattctagcgagagggccatgttcagaaattctgaatgactgcttctaagtcgatccccgtaaatatacgcctcaagccctaaacttcctagcatcaaagcgaaaacgtatgccgcgacacggttaccaagccagtgcttgcgggcaaacaggctcaaggagggccatcaaaatgattgaaatcagaaagtctgcagagcgtggttacgccgatcatggctggctgaagtcctttcattcgttctcgttcgccgactactatgacccgcggcatgtgcagtttgggccactgcgagtgatcaacgaggaccgcgtcgcgccgggcatgggctttggcacgcacggccaccgcgacatggagatcatcagctacgtgcttgagggcgaactggcccacaaggacagcatcggcaacggcagcgtgatccgccctggcgatgtgcagcgcatgagcgccggcaccggcgtgcgccattcggagtacaaccacgccgcgcacgacaccacccacttcctgcagatctggatcatgccggccgagaacggcatcgagcccggctacgaggaaaagcatttcgacgcagccgacaagcgtggcaagctgcgcctggtggccagcgccgatggtgccgagggctcggtggtggtccaccaggacgtgcgcctgtacgccggcctgttcgatggcgacgaggctgccacgctggcgcttgcgccgggccgccgcgcctatatccacgtggcgcgcggtcgggtgacggtcaacggcaaggcgcttgaagccggcgacgcggcgaagctggaagccgagggcgaggtcgcgctgtccggcggcgatggcgccgaagtgctggtgttcgacctgtcctgagcatcgttcattgccgcatgcgagagcccgccttcggcgggcttttgctttttgcattgcgcgccgggctccggcaggtaccgctgtgctatcttctcgctatgcattgcgcctgcgccggcacatcgccggcaagcccggaagggccaggcgtgcccttggaacaccccgtaccaagatgacctttgtttccattctcctggcgctgatcgctgaacaattccgcgccctgggccgcaacaacccgatccacgagatcgtgcgcgcactcggcgaccgcgcggaacacgccttcgacaccggccgcccgcgcgatgccgcgctggcctggctgaccgtggtcctgccgctgaccctggcggtgatcgtggtgcactacctgctggcctcgatcagcgtggcgctgacgctcgcctggaatgtgctggtgctgtacatgacgctgggctttcgccagttcagccactacttcaccgacatccacgaggccctcaaccgcgatgacgtccataccgcgcgcacgctgctgcacgagtggaccggcctggacaccgtcgagatgccggtctccgagatcgtgcggcacacgctggaggcggccatcatcgccgtgcaccggcatgtgttcggcgtgttcttctggttcctggtgccggtcggccccggcggggtggtgctgtaccgcaccgccgaatacctgagccgccactggaaccagccctcgaccgagcgcagccccgcgctgggccgctttgcggcgcgcgccttctatttgctggactggattccgtcgcggctgacggcgatcggctttgccatcgtcggcaacttcgaggacgcggtctacgcctggcgcaaccatgcgcgcaagtggaacgatgccgtcaacggcatcctgcttgccagtgggggcggggcgctgggcgtgcgcctgggcacgccgctggccgaggatgattccaccgtggtgctgcgcgccagcgtggctggcccggccgtggactatgcgcccggcatggaagaggaaaacggcggcccggaaccggtgccgcccgaattcggcaccgagcccggcgtgcgcacgctgcagtcggccgtgggcctggtatggcgcgcggtggtgctgtggatgctgctgctggcgatgctgtcgctggcgctctgggtcggctgaccagcgtcaaaaagggggcggcgcgctagtcgcgggccgcgccgcagcgccagcaggccccgaactgggcctcgtgccattccaggcagtggcggcattgccagctcggccccggcgccgggttggcggcggcattgagcaccgcccacgcctgcgcttccatctcgtcatcgaccagccacacctgtggcgcactctcccggaacgggatctcgccggtcgcgccggccagccaggtattgcgcaattccgcccggatgccggccgcccgcaggacgttccggcaatgggctgcatggacgagggaagtggcggacagcagcagtttcatggcagcgcaccgggtaacccaggtgcgcttaccttaccacggcttctgctggttggattcgtgcagcaactgcatgtagagctggtggcggcgctcggagatcgctcccgaggcgaccgcggccagcacgccgcagccgggctcgttgacgtggtggcagttgtagaagcggcacccggtcagcagcgggcggaactccgggaaggcgcgctccagcatgccctcgctcaggtggtacaggccgaattcctggaagcccggcgaatcgatcagcgcaccctgatggccgtccacggtgccccattcggccggcaggtgatagagccgcgtgaaggtggtggtgtgcttgccggagtcgagcttggccgagatctcgcgggtctgtgcatccacccccgggatcagcaggttcagcagcgacgacttgcccatgcccgattgcccgatcaggatgctggccagccccgccaggcgcggcttgagcgcggccagcgcctgcgccgggtcggcgcgcaccgacagctccagcgtgtcgtagcccagcccgcggtacagcgccaggcgccctcgcgcttcttcgagccggtcgggcaggtcggtcttgttgagcacgatcagcggccggatctccatggcctcggccgacaccagcgcgcggccgagcaggtcttcggagaagcccggctcggttgccagcacgatcacgacctggtcgatattggcggccagcagcttggacttgaactggtcggagcggtgcagcaggttcttgcgcggcgaggccgcggtgatcacgcactggtcggcggcggcgcgttccacgctgacatggtcgcccaccgcgcagtcgctcttcttgccgcgcgggaaggcatgcatgcgcgtgccgtcgcccagctcgaccacgtagtggcggccatgggcggcgatgatcagcgcggattcggtggccgtgccggcatggctgccgccgccggcgttgcggtgacgcgtggcgcggctcatgcgtgcgccagcaggcggtcgatccgctgcgcggcgggcggatgcgagtagtagaaggcgctgtagagcggatccggcgtcagcgtcgaggcgttgtccttgtacagcttcaccagcgccgacaccaggttgccggcatcggtctggtcggcggcaaaggcgtcggcctcgaactcatggcggcgcgacgacaggctcgacagcggccccagcaggaaggtgaacaccggcagcgccaggaagaacagcaccagcgccagcgcgttgttggacacgcccaggttgggcaccacgcccagcccggtgtagaaccagctgcgcgtggccagccagcccagcagcgccaggaacaccaggctcagcgcaaaggtgacgacgatgcgcttggtcacgtggcggcgcttgaagtggcccagctcatgtgccagcaccgcctcgatctcgtcgcccgacaggcgctccagcagcgtgtcgaagaagacaatgcgcttggccgcgccgaagccggtgaaatacgcattgccgtgggcgctgcgcttgctgccgtccatcacgaacaggcccttgctggcaaagccgcagcgcttcatcagggcctcgatgcgctggcgcagcgattcgtcggtgagcggctcgaacttgttgaacagcggtgcgataaaggtcgggaacaccaccagcaggaacaggttgaaggccatccacaccagccaggtccagacccaccacagcgagccggcgcgctccatcagccacagcaccgccagcagcagcggcaggcccagcgcgcaggccaccaccagcatcttggccatgtcggccagccacaggccgaacgtcatcttgttgaagccgaagcgctgctcgatgccgaactggccgtacagcgagaacggcaggtccaccagcccgccgatcagcgccacgctggccaccagcgccacgccataggcatagcctgggccgaaagtgtccagccaggactggttgagccactgcagcccgcccagcatggtgaagccgatcagcaccgcggccccggccagcacctcgagcatcgacagccgggtgcgggcgatggtgtagtccgcggccttctggtgcgaggccaggctgatggtgtcggcaaagcgcggcggcaccgcattgcggtgctgcgccacatgccggacctggcgggcggccagccagagcctggtcagcaccatcagcaccagggcggcgagaaagacaatcgtgaacatcggcaagagccttgttgtgggtgcgggcgccccgcattgtgcgcggcgggcgtccgttggaaccgccgagccccggggtggggcaggcggtggtccgggatatccggaaaacaccccggcgctggtgcgcaaacggccattccggacggatatgcgagaattataaattgttcgcgcccgcccccgccgcggccgcttccctgaaatccctatcttccgcagtcccgatgacaagccaagccaccgccaaatccgtcaaaagcgaaaacaacctgatctggctggacatggaaatgaccggcctgcagccggataccgatcgcatcatcgaaatcgcgatcgtcgttaccgactccgaactcaatatcctggcggaaggcccggtgctggtgatccaccagagcgacgccgtgctcgatggcatggacaactggaacaagggcacccacggccgctcgggcctgatcgacaaggtcaaggcatcgaccctgaccgaagagcaggccgaggccgagctgctggccttcctcaagcgctgggtgccggccagcaagtcgccgatgtgcggcaactcgatctgccaggaccgccgcttcatggcgcgctacatgcccaagctggaggccttcttccactaccgcaacctggacgtgtccacgctgaaggagctgtgcaagcgctgggagccggccatccacaagggctttatcaagcgccagctgcatacggcgctggccgacatcctggaatcggtcgaagaactgcgctactaccgcacgcactttatccggcacaccgcgccgggcgccgcaccggcagcggacgcgccggccgccggcacgcccgcgcaataagcggggccggctgctcccggaacaacaacccactgcaagcgacgggccgcccgcacggggcggccgtcgccggggcgcgtcccgcccgcctgcccatgcttgagcgcatcgtctccatcatcacgccggtcatcctgatcatcctggtcgggtggctgtacgggcgcaaggcccatccggacatggccggcatcaaccgcgccacgctggacgtgatcgcaccgctgctggtggtgtcggccttcgtcagcaaggatttcgtgctggccgaccagctggtgctgctgggctgcgctgtggcggtggtgctgggctccggcgtgctggcgtgggcgctggcgcggctgctgaaggccgatccgcgcaccttcgtgccgccgatgatgttcaacaactgcggcaacatggggctgccgctgtcggtatttgccttcggtccggcggggctggcgccggcggtggcgctgttcgcggcatcgaacctgatgcacttcaccatcggcatgaagatcgtcaaccgccatgcgtcgatggcgcagatcgcgcgcaaccccatggtgctggccaccgtggcgggcgtggcgctggcgctggcgcggccatggttcacgctgccggacccggtataccagtcggtcaagctgctgggcgacgccaccgtgccgctgatgctgtttgcgctgggcgtgcgcatgaaggacgtgagcctgcgcaactggggcatgggcctggtcggcgccgcggcctgcccgctgacgggaatcgcggtggcgctgctgctggcgcagtgggtgccgctgaccgaattgcagcgcggcctgctctttgtgtttgccgcgctgccgccggcggtgctgaacttcctggtggcggaccatttccggcaggagccggaccaggtggcgtcgatcgtgctgctgggcaacatcgccgcggtggtgttcgtgccggtggggttgtacctgggcttgcgctgaggcgcggggaaggggagcccgcaggcgcgcgcctgcggggattggcgattacgccgcgggcttggcccgcacggcgttcttcgggcgccaggccttgaccacggcctcatcggtttccatgtaggggccgccgatcaggtcgatgcaatacggcaccgcagcaaagatcccttgcgccacggccttgccatcggcatcgcgcaggccctccagggtctcgcggatggcgcgcggctggccgggcaggttgacgatcagcgcggcgcggctggcggtctcgcggatcaccgccacctggcgcgacaggatcgcggtcggcacgaaatgcaggctgacctggcgcatctgctcgccgaagccgggcatttccttggtgcccacggccagcgtggcctctggcgtcacgtcgcggcgcgccgggccggtgccgccggtggtcagcaccaggtcgcagccggccacgtcgaccaggtcgatcagggtgcgcgagatctgcgcctgctcgtccgggatcagccgctccaccgcctgccagggcgtggtcagcgtgcgcccgaaccactcgcgcagcgccgggatgccttcgtcctggtaggtgccggccgaggcgcggtccgagatcgaaacgaagccgacaacgagttcatcgggatggttgcggactaccggctgcgtggtctgggtcatgcctcgggctccggggtagggggttggtccgcggcggcgccggccttgccgtccttcgcatccagcgccgtcttgatcgcctggaacagctcgcggaaatagcgcggcggcttgccttgctccttttccttgcgcgcgttgcggatggtgttgcgcagcgcctgcacgtcgatgccggggtgctcggcgaggaagcgcgtcagcgccgcgtcgtcggccagcagcagctcgcgccagcgctcgatcaggtgcatgcgggcggtttcggccttgctggtgcccttgaagccctccagcgcttgccggatcacctcgacctcttcgtcgtcgaggccgcgcatgatcttgcccacgaactgcatctggcggcgcttgccctcgtggctgttgatgcggcgggcctggtggatggcgtcggcgagcgcttcgggcatgggcacgcgcgccaggcggtccttggccagggcttcgagctcggcgccaaggtcctgcagggcggtcatttcgcgcttgcgctgcgacttgcttttcggttcgtcgtcttccggttcgggcgcaaagcctccgggaaagcgcgagccattcggattacgggaatttcgcgtcatgcccggcattttatcttgctatgattgccgcttggacttttgatgacacccgcccagcatggaccagatcgcagaacagaccgcgcacttcacctacacccaggcccagctcagcgagatggccgccgatgtgctgcgcgttgcacgcgaacttggggcgaccgacgccgccaccgagatctccgaaggcagcggcctgtcggtatcggtacgcaaggggcaggtggaaaccatcgagcagaaccgcgacaaggtggtcggggtcacggtcatgatcggcaagcgccgcggcaatgccagcacctcggacttctcgccggccgcgctgcgcgccactgccgaggccgcctacaacatcgcccgcttcacggccgaggacgattgcgccggcctggccgaggaagaactgctggaacgcgcgccgcaggacctggaactgttccacccgtgggcgctggacgccgagcgcgccatcgacattgccacccgcgccgaggccgccgccttcgcggtgtcgccgcgcatccgcaacagcgacggcgccagcgtgtcggcgcagcattcgcagttcgtgctggcgaccacgcgcggcttctcgggcggctacccgtattcgcgccatttcatctcgtgcgcgccgatcgccggcagcggcagcggcatgcagcgcgatgactggtactcgtccaagcgctcgccgctggcgctggccgcgcccgaggacatcggccgctacgccgccgagcgcgcgctggcgcggctgcaggcgcgccagctgtccacgcgccgctgcccggtgctgttcgaggcgccgcttgccgcggggctgctgggcgccttcgtgcaggcggtgtcgggcggcgcgctgtaccgcaaatccacgttcctgtgcgattcgctgggccaggccgtgtttgcgccgcatatccagatccatgagcagccgcacacccccggcgccatgggcagcgccccgttcgacgaggaaggcgtgcgcacccgtgcccgcgacgtggtccgcgacggcgtggtgcagggctatttcctgtcgacctattccgcgcgcaagctcggcatgcagaccaccggcaacgccggcggctcgcacaacctgacactgaccagctcgctgaccgagcccggcgacgacttcccggcgatgctgcgcaagctcggcaccggcctgctggtgaccgagctgatggggcagggcgtcaactacgtgaccggcgactattcgcgcggcgcctcgggctactgggtcgagaacggcgtgatccagtacccggtggaggaaatcaccatcgccggcaatatggccgagatgttccagcagatcgtcgccatcggcgcggactcgctggtgcgcggcaccaaggaaaccggctcgatcctgctcgagcagatgacgattgccggcacctgagcggcgcgcgccacccaaaaaaaagcaggcctgacggcctgcttttttattgcccgcgcaacggcttacgactcgtccgacggcggccgctcgtacgtgacgaacgcatagtcgaagccattggcctccgaatgatgcgtctcgcgcgcggtctccacccattgggtgcggtcgattgccgggaagaaggcatcgccttccacatccgcatcgatctcggtcaccaccagccggtccgcgcatggcatggcctcggcgtagagctgcgcgccgccgatcaggaagatctgctccgcgcccacgcacaggcgctgggcatcttccagcgaggccgccacctcggcgccctcgatgcgcaggtccgggttgcggctgaccacgatattgcggcgccccggcagcgggcggccgatcgagtcccaggtcttgcggcccatgatcacgggcgcgcccatggtggtacgcttgaagtgcgccaggtcttccggcaggcgccacggcagcgtgttgtcgcggccgatggtgttgttgcgggcgcgggcgacgaccagtgtcagcagcgtcatacggccaccggtgccttgatggcggcgtgcgactggtagccggccagttcaaagtcttcgtagcggtagtcgaagatgctgtcgggcttgcgcaggatcttcagctgcggcagcgccagcggctcgcgcgccagctgggtctgcacctgctcgaaatggttgttgtacaggtggcagtcgccgccggtccagacgaagtcgcccacttccagcccggtctgctgcgccatcatgtgggtcagcagcgcatagctggcgatattgaacggcacgcccaggaaaatatcggcgctgcgctggtagagctggcacgacagccggccatcggccacgtagaactggaagaacgcgtggcagggcggcagcttcatgcgcgggatgtcggccacgttccaggccgacacgatcaggcggcgcgaatccggattggcgcggatctgcgccaccaggtcggtgatctggtcgatatgtcggccgtccggcgtcggccacgagcgccattgcgagccgtagaccgggcccagttcgccgttctcgtcggcccactcgtcccagatggtgacgccgtgctcctgcagccagcgcacgttggtcgagccctgcaggaaccacagcagttcatagatgatcgacttcaggtgcagcttcttggtggtcaccaccgggaagcctgcgcgcaggtcgaagcgcatctggtagccgaacaccgagcgcgtgccggtgccggtgcggtcggccttgtcggtgccatgctcgtacacatggcgcatgaagtcgaggtactgtttcatcggcgcggggcgggatcgggagtgacgcgggtactggtcccgcaaagctggcattttaaagcaaaagggccatccctcaggatggcccttcagcggcatggccggggcgggtgccccggccatgcctggcacggcttgccgccttagtggctgccggccggttgctgcacgcggcgcttctgcaccaggtagccggcgcccagcacgccgccgacgatcagcacgtacaggccccagttgaccaccgggttggcttcgaagaacgccttgatcatcggctcgtgcacgatcatcttgactgccgtgaacgccagcacgcctgcgcccaggtagatgatgatcgggaagcggctcatcagcttgagcaccaggctcgagccccacaccacgatcgggatgctgatcagcaggcccagcaccaccagcaggaagctgccgtgcgcggcgccggccacggccagcacgttgtccacgcccatcaccgcgtcggcgatgatgatggtcttcattgcgccccacagggtcgaggcgcccgagccgtgcccctcgccgtcgccttcgtcggacagcagcttgtaggcaatccacaccagcgccaggccgccgatcagcatcagccccggaatcttcagcagccagaccaccccgatcgtcatggccgagcgcaccaccacggcgccgacggtaccccagatgatggccttcttctgcaggtgggcgggcaggttgcgcgccgccagggcgatcacgatggcattgtctccagccagcaccaggtcaatgacgacgatggacagcagtgccgtcaggaactgcatcgtgaacagatcggtaaaccactccatgaactctcctcagggtacaaatcagcgcaagtgcgcgtatcgggttcgcctggtttcacgtagcacgggagcgtgggggcgcctttgcaaaccatgaagtccaggttgcaaaggtcttgctcgaccactggcgcggtatgcacgccggtagtcagcacaaccggggacaagggtcccggaatgacgattgtgctaagggcatgggccccggagctactcccctttgagggacacgacccgtttcggggccgcgctgggcgggattataaacgaactgcaagggatatgccccattaggaaagatactgactcaaagttcttgatgtgctgcgtgcggcgcatccggcgatcggcggtgcgcgatccgccggatgggcctatcctttaggttcggcttcgcccgatgcgtcccggacggcacagggaggcgttgcggagaccggcgcgcacgacatgcacagcgcggccttggggaatacgcagtgaagcagtgaccattcgcgaccacacaaggaaacgacatgccggctgtcccgaatccgccgaatacccccttccagaaaaaagccccgcagacacctctcccacccctgaaccaccacaacggccatgcggccgcaccgcccgccctggtcgcgctggccaatggccgcgcgcaccggcagccgccccagccggagttcgtgcagcagtaccgcgaggacagcggcgcgctgcgcgagcaggtgctggccgggctgcgtgccgggcaggccgccatcagccccaagttcttctacgacgtgctgggctcgcgcctgttcgaagccatcaccgacctgccagagtactacccgacccgcaccgaggccgcgatctttgccagcgcggcgcccgccatcgccgcgcgtgccggcagcggctgcgtgctggtggacctgggtgcgggcaattgcgaaaaggctgccaggctctttggcaccctgcgcccggcgcagtacgtggcgctggatatctccatagagttcctgcgcgcgacgctgtcgtcgctgcagcagcagcatcccgacatcccgatgctgggcctgggcgccgacctgtgtgcgccgttcgatctgcccgccaacgtcaggcgcggcaggcggctgttcttctatccgggctcgagcatcggcaatttcgccccggtcgaggccctggcgttgctgcagcgcatgcgcggcgcggccgggcgcggcgacggcgtgctgatcggggtcgacctgcacaaggacgaagccacgctggtgtctgcctatgacgatgcgctgggcgtcaccgccgcgttcaaccgcaacgtgctgcgcaacgtgaaccgcatcgtcggcacggatttctcgctggacgactggcgccatgtggcgagcttcgaccgcgcggcctcgcgcatccagatgcacctgcaggcgtgccgcgacgtgcgcgtgcagtggcagggcggcgcgcgcgagtttgccgccggcgaacggattcataccgaggactcctacaagtaccgcccggaggacttcacgctcttgctggaagccgccgggtttgacgacccggtgtactggaccgacccgagcggctggttcgccgtgttccacgcgcgcggctgatccgcccgcgcgggcgccatccggcggggatggcaggtagtgtcataatgaccgcggccggcctggcgtgcgagcgccgggccagcagttgcctgcttcggtcactgcctgtccactgttcactcccctgcacggactttcccgatgagcggctttcccatgcttcccgatctctacttcaccggcggcaaggcgacctggtccgacccgcgccggctgccgcgcgaagggctggcgcaggcgctggtcgatgcgcgcaaccgcacgctggcgtggctggcaccgttcgggcagacgcgccgcgcctgggacgtgccgcatcagtacgatgccgatccgccgttgtggacgctcgggcacgtggcctggcatgcggagtggtggtgcctgcgcggcgtgcgccaggtggaccgcggcggcgtgccggtgccggtggcatctgagccgtcgctgctggacggcgccgacgagtggttcgacccggaccgcatcggccccgacgagcgctgggaggtcacgctgcccgacgtcgcggtggtcaagcgctacgccggccacgtgctcgacggcgtgctgcgccggattgcgctgctggccgacgacagcgacctgaccctgtacccgtaccgccgcgcgctgctgcatgaagatgcccagggcgaaggcgtggccgcgctgttgcaggcgctgggcatggctcccgcggaggccatcggcgccggtccggtgcagcctgcggggcatggcggcaccctgcatttcccgggcggtcgcttcacgctcggctggagcgatcccgacggctttgcctggcccgatgagctgccgccgcagcccacctacgtgcccgcgtttgaaatggacatggcgccggtcagcaacgcgcagtttctcgagttcgtcgaggacggcggctacgagcacccggcgtggtggtcggcagcggggcgccagtggctgatgacgcaggaacgctcggcgccgcgctactggtcgcgccatccggaatcgcgcgcctggatggtggagcgcttcggaacgcggcgcacgctcaatccggatgaggcggtgcgccatgtcacgctgtacgaggcgcaagcatggtgcgtgtgggcggggcggcgcctgccggcggaatcggaatgggagcttgccgcgacgcagaaccgcggcctgcagtgggggacgctgcgtgagtggactgccacgccctatgagccgtacgccgggtttgccgccgcgccgtcagacagcgaggtggtggggcgcttcggcacgcaccaggcggtgcgcggtgtgtcgttcgccagccccgcgcggctgcgccatgtgcgggcaaggtgggcgcggttgccggaggacgacctgtccttcatcggctttcgcacctgcgcgccgtagcgggctgtacgcgacaacaaaaaagagcacccgagggtgccctttcttctgcctggcaggtgcgcttagcgcaccaccgcatcaacgctcgtagcgcgaacggctgttgcggttgccgctgccattgccgccgaaactgcgattgccgtcacggttgccgtcgcggttgccgaagctgcggccgtcgccgttgccaccggtgttgccacgatagccgccgccagtgcggtcgccgaagccaccacggttgttgtcgccaaagctgcggggggcggcgccgtcgcggttgccgaaaccaccgcggttgtcgtcgccgaagctgcggccaccttcgcggttgccgaagccacgcgcaccgtcgttggcgccgcggtagccggcgccctggccgccctggccctggccacggtagccgccttcacgattgccgaagccgccgcggttgtcgtcaccgaacgggcgtgcgccttccgggcggttgccgaagccgcggctctcgccgctgaacttgcgctcgccgaagccggtgcggctttcgccgccgccgaacttgcggtcgccgaagctgcgttcgccgccacggtagccgccgccattgccgcggaagtcaccacggccgccacccggcttgccgccgaagttggaacgcggcttgggcgaacggcgcggctccaggccttcgatcaccgaagcgtcgatgcgctggttggtgaagcgctcgatgcgcttccactggaacatgtcgttgtggttcaccaggttgatggcggtgcccgagcggcccgcgcggccggtacggccgatgcggtgcacgtagtcctcggcctgcttgggcaggtcgaagttcaccacgtgggtgatatcgggcacgtcgatgccgcgcgcggccacgtcggtggccaccagcacgcgcaggttgccgcggcgcagcgcggtcagggtgcggttgcgcgcgccctgggtcatgtcgccgtgcagcgcgccggccgaaaagccggtgtcggacaggcgctcggccagcgaatcggcatcgcgcttggtcgcggtgaagacgatggcttgcttgagcgtcgcgtcgcgcagcaggtggtccagcaggcgttccttgtgcgacatgtcgtcggtgaagtgcaggcgctgctcgatatggctctggtcggcgcgggccgcggcgatctcgatgcgctgcgggtcgcgcagctggcgcgaggccagctgggcaatgcgcgcatccagcgtggccgagaacatcagcgtctggcgcgtggccggggtggcattgacgatggcgtcgatgtcgtcggcaaagcccatgtcgagcatgcggtcggcttcgtcgaacaccagcatctgcagggccgacaggtcgatgcggccggcgtcgatatggtcgagcaggcggcccggcgtggccaccaggatgtcaggcatcttggccagcgcggccagctgcttggggtagggcatgccgcccaggatgctggcgcagacgatgcggcgcaggttgcggccgtacttggcggcggcctcggtcacctgcagggccagttcgcgcgtcggggtcagcaccagcagtgcgggctgcgccggcgacgggcgggggcgcttgcccttcatgcgcttggcgggctcggtcgcgcgctgcggcgccggcatttcgctgatgcgctggatcgcgggcagcatgaacgcggcggtcttgcccgagccggtctggctcgagaccagcaggtcgcggccggccaggaaggccgggatggcctgggcctgcaccggcgtgggcgtgttgtagttcagttcggagagggcgcgcaggatggccgcatcgaggccaagcgtggcgaaaccgctttccacggccggggcttcttcaactgccgggctggggttgagcagggcgtcgagcttgtcgagcgggctctgggcagcgtcggaagtgatcgaagcgtcggtcgcggaggcaatagcttgctccgcacgaatgtcgtgctgggtcatgtcggaatggtcaaataaatgcatggcaccccggcaaagcaaaatggggtgggcgcagtgcaaagtcttaaaaaggcttcggcgccaatcggtgaggccgttacgacagacacagctggcagtacggcggcaggcagggcggtggctggtcccgctaggcggtccggccgtatccctggcaggcaaacagctcaggtttcaggctgttcaacaggatcggagacgaggcgacgtcaggtgagcggtgcgttctgctgggcggctggggccatgaagtgatgactaggcgtccggcagcgaggaaacagagcttgggagggcagcggattcgccgcggcaggaagccgggcgtttggcggatctcacagttgcgaaactcacggcgcggattatagcagagtacggaatttttgttgcactgcgaaaacgtaaccggatatgtcaggcgctcgtcaccttccggacgcgccccgcgccacgctggttgaaaggcgaaaacccccgcctatactggaggcgcgagcacacaggatgcccgcacggggcggacgaaaacgctcccgcttgacctcctgcagcggcattgggccgctgttcgcggcgagcactgcggtcattgactccacgcgccagacttcctgcgactctccgggtggtccggatgggcgtccgcttcatgcatcatgggcggaatcatgggaagcctgcctggaacagaatgaccgaactgctgaccgcgtgacccaggtggtccgggcccgtccgcatccaaagcccgccagcgatggcgggcttttcatttggcggttgtggttgcggttcagtcttctgcatccttgccagcggccttgcgcggcagccgccctagcggctgctcctgcggcatcacatggcggttgcccggcaatccgcccgggtagtcgacgatgcgcgcggtgtcctggcgccgcaggccatgccatgcctggccgccggcggtacgcccgccgcccaggatggcggtcatggcctgccggtcgagatccatgctgtcgggcaaatccttgatgacgatcactgccatggctgtctccggtcaagcggcgccacggccatgcggccgcgggaccgcttcagtataggcgaggcggtccgcggtattgcccgcggggccgccgcgcggtgcgctcagactgcggcgaaattgccggcccattgcgacgggttgacgttgacgcgcaccgggccgaagtcggggccgacgatgctgttgttgagcgtgttgacgttgatgctctgcagctgcgcgatgttctggttgacgttgacggtgacgttggccagcgggccgacgctgccgacaccgcggctgagccacgagttgccgccgcgtacggcgcacagcgaggcacggtcgagttctttgctcagggcgagatcgcggacgaggatcgatgacatggtggtgctcctttgagtcgggtgccgggggcggctggcgcggagattgcagcatctgcgcgccagcagtggccagggcgtatcagccgaagatgttgttggtggcgttctggttggtgtgcacgtcggacttgacgtggtccaggaaggccgagccgttgccgttcaggttggtcacggtctgcatctgcgcgatgctttgcgtggcgttgatgctgttgtccagcgacagcctgatcggcgtgtagacggcggcgaagggcaggtaggccaggccgccgcgcacggcgtgcatgcgcttgctgtcgagggtttcggcggcgggcaggtccttgatggtcagcgtggtcatgatggtctccggtatcggtcagtgcgtgggtgtgggtggctggggcgcgtgggctcagccgtagatgttgttgctggcgttctggttggtatccacatgcgaacggacatggtccaggaaggccgagccgttgccgttcatgttggtgacggtctgcatctgggcgatttcctgcacggccttgatgctgctgtcgaacgacagcttcaccgggctgtagaccgcggcgaacggcatgtaggccaggccgccgcgtacggcgtgcatgcccttgcggtccagggtttcggtggaggacaggtccttgatggtcagcgtggtcatgatggtctccggtagaggaaggtactgccttgggtctggtttcgagcatcgggttggtgtcgcgctcgggaggtactaacgcagggactgtgccaatgccgttgccggtcccgaccagtcacgcgcaactgcctgaaaacacgggcgatttattttcgatgtcggcttgcgggcactggctgcgggcgctgccgcatgctacgggtgacgggccgcggccaacaggcggcgtgccggtgttggcgcggccgcgacagtggcgcgccaaaggcgatgcgattggcagggggcgcccgcgcgcggcgttgcacgccggcttcgcatggtttgcgcatgccttgggtgcgcactagtatccatctcgaaggcaggcatatccgcatcgtgggatgcgccgtgccagcaaccatgtcggggcatccggtggccagtctcaaagaactgatccgcaagttccagaacggcggtctctccgacgacgagtttgttgcgtcgttcgaaacggcgctggcgcaggatcccaccacgcccagccaggccgcgcgcgtggtcatcgaggaaaacacgcgcttcccgttcccgcccgcggtctatgccgaagtcatgcggcgcatcgagcgccgcggcgccacgcagtacgacggcgccaccgaggccacgcgcctggccggcacgcagacgggctcgctgtatgcgacctcgcccgagccgggcacgctgccgcaggcggcgcataccaagggcgtgggcgatacgctgaacggccgcttcgtgctggaagaatgcctgggcgtgggcggcatgggcacggtctacaaggcgctcgacctgcgcaagctggaagcctcggaccgcaagccctatatcgccatcaaggtgctgaacctgcagttcagcgggcaccccaagtcgctgatggcgctgcagcgcgaggcgcgcaaggcgcagacgctggcgcaccggaatatcgtcaccgtctatgacttcgaccgcgacgggccggtggtcttcctgaccatggaatacctgtcaggctcttcgctcaaccatgtgctcaaggccccgggcttcaccggcatgccgatggcgcgcgccatgtcgatcatcaacggcatgggcaatgcgctggcatacgcgcacgagcgcggcttcgtgcactgcgacttcaagcccgccaacgtcttcctgaccgccaacggcgaggtcaaggtgatcgacttcggcatcgcgcgcggcttcctgccgccggccgacgagtccgaccggaccgtgttcgatcccggctcgctgggtggcatgacgccagcctacgccagcccggagatgttcgaccattgcgagcccgacccgcgcgacgacatctttgcgctggcctgcgtgacctatgaactgctgaccggcaagcatccctaccagcggctctcggccaaccaggcgcgcgatgccgggctcaagccggcgcagccgccgcagttgagccgcacgcagtggaagaccctgcgcgaggcgctgtcgctcgaccgcgagacacgcacgcccaccgtcgcgcgcttcctgcatggcatgagcgcggtgccggtggtgtccacgcggcgcccctcgccgctgatggcaggcggcgcgctggccgtgctggcgggcgtgtcggcgatcggctactacgcctggcattcgcagcgccaggccgaagcaccggctggcgatgcgcgcgtcgaggccccggctacaccggtgcccgcagcgccggtcatcccgcccgcaccggctgcccgcccggcggtgctgtcgatggccgacgtcacgaagatgctggccgcggtgccgtgctcgctgctcaccgccacccagcaggcgcagacgttgcgtgtgcgtggcttcctggccgagagcgtcggcgccgtgcggctgcgcgagcagctcagcgcgttgccgggcgtcaaggagctcaagggcgtgtcgatcgacacccagccgctggccgccgacaagtgcgacgtggccaccctgatcgcgccgtactggtcgggccaccgcgaagggggcacggcttcgtcgctgcggctgcgcggccagggcacgcagctgaccgaagggtcaccgctggtgctggatctgcgcacgccggcgcgcgactcctatgtctatgtcgattacttcgcggccgacggcaaggtggcgcacatggtgccgagcgcgcgcgtgcccgcccaccaggcgccgcccagccatggcgccacggttggcgacggtggcgactggatcatctccgggccgttcggcaccgagctggtggtgttgctgaccacgcccgcgccgctgttcgatggccggcgcgccgaggtcgagctgcacaaggactacctgaaggcactggaaaagccgctggcgcagatggcgcgcacctatggccgggaccgcatcagcgcggacctggtgcagatctccacgcgcgcgcgctgattgccgccagccggccggcttgccgcttggcaattgcgccagccgctacttcatgtcgcgcgccacgcgaaagccgttctgcgactgccgcacgctggggctgtacttgaagcgcgtggacgacaccatgtagttcgccccctcgcgccaggagccgccgcggatcacgcgtgcgccgcaggcgttctcgttccatacgcgcccgtcggcgggcgcgcccttgtatgagctgtgccagcaatcggccacccattcccacacgctgccgttgacgtcgtgcaggccgtacgggttggccgcgaatgtcccgaccgcggccggcgcatcctggctccatgggtcgccgcagtccttgcagttggcattgcccttgcgcatctggtcgccccaccagtaggcactggcggtgccgccgcgcgctgcgtattcccattcggcctcggtgggcagccggtaggacttgccggtggtcttgctgagccaggccacgtactgctgcgcgtcgtcccagctgacgtcgcgcaccggcgcgttcttcgcgctgtcggcgacggtggggacgcgctggcagccgccggcgtcggcgcaggcattccattgctcgaccgtgacctcatagcggccgatggcaaacggctggccgatggtgacgtggtgcgggggcttctcggcgggatcgctggcactgctgcccatggtgaagctgcccgccggcagggggaccagcaccgggcaggccgggcaatcgcggatctcgccggtgcgcaatgtggcgctgaccgcgccgcccgccgccgcgcccgggcgcagcgatgccgttgccggtggcgcagcaggtggcgcagcaggtgacgcagcgggcggcgatgccggacgcgctgccgcggccggtgccggcggccgcgtgacctggcccccggcagaggtgccggagcggggcggcggtgcgggcgcctgggccttgggtgcggaggcggacgccgccagccgctccaggcgcgccctggccagcaccgcgaagcgtccgttggggtactgcttcaggtaggcctcgtagtcgccggcataattgctgttcttgatcgattcccagaagctcagctcgtactgctcctcggtgttcttgggcatgatgccggcgagcagcagcggttccgtggccgcggggccggcggcagcggcggccgcctgcgcgggcagcggcgcggcggcgagcatggcggccatggcggccgtgcgtacgactggtagattgcgccacatcttcacacctcgctggagccgcggcgatcccgctgcatgccggtagctgccggcacatgcgtcgggggcgcattgtggtgttgccgagacgtcgaccggcttgcttcaagatagcacagcgcgtgtgtctccggcggggcattggcacgcaaccgcgacgcgccgggttcgctttttccgtgcttgcgacctaacctgaatgacgaatcgccgagcgctgaccaacaagcaacaagaatgggctttcgggacaacgtgatcgggtttcggactgttatccgggaggcgccgcgtatgtccagacgattcctgttccgcctgctggcggttgccgccctcgccgcggccccgtcgctgtcgctgtcgacggcagccccgcccaatgccgaggcctacatcatctggccgcacgatggcacggtcatcagcggcggcaagttctgggtgcgcatgggcctgcgcaatatgggcgtgtgccccaagggcgtcgagtcgccgcgctgcgggcaccaccacctgctggtcgacaccgagctgccgccgctggacaaggaaatcccttcggacaagaaccacctgcacttcggcgcgggcgagaccgacgcgcgcattgagttgccgcccggcaagcacacgctgcaattgctgatgggcgatgccaagcacgtgccgttcgagccgccgatctattcgaagaagatcacgatcacggtgaaatagcggtgcagcgcgcgccgcggaagccgaacctaggccgatcagcaaacagggagagcaccatgtccagactacttgccgcggctgtctttgccgccagcctgctgctgtcagcggtggtgcagggtggttcgacgccggcgccgcccaacgcctacctgtatatcggctggcccaacgacgggcagacgatgcccgcgggcaagccattcaaggtctggttcgggttgcgcaatatgggggtggcgccaaaggacgtgaagtatcccaatactgggcaccatcacctgcttgtcgatgtggacctgccgccgatggacaaggagatccccaatgaccgcaatcacctgcatttcggggcgggggagaccgagaccatgatcgagctgccgcccggcaagcatacgctgcagctgctgatgggggatgacaagcacattcccaccaacccgccggtttattcgaagaggatcacgatctacgtgaagtgatccggaccttgcggtgacggcggcgcgcaatgcgccgttttttttgtgcgctggcgccgcaagtgtcggtcgccatccaacatcgacgggcaagctgttggctgcgcgccgccagtgcgcgctgacgcaggctcgccgcgcctccgccgccggcgctggcggcaagaaaaattccccgtgtttacaggcacttccgtgatccgcgcggccatggcgccggggctggcacgctccctgcgattgtccctcctgagcgcgacaccaacccgatgctcgaccaaccaccaaggtaacaccttcctctacccggagaccatcatgaccacgctgaccatcaccgacctgaccaccgtcgacaccctggaccgcaagggcatgctcgccgttcgcggcggccgcaccctgctcccgttcatgccggtgtaccacccgctcaacctgtcgttcgaccacagcatcaccgccgtgcaggaaatcgcgcagatgcagaccgtcaccaatatgaatggcaacggctcggccttcctggaccacgtgaagtccgacgtgcacaccaaccagaacgccaccaacaacatctacggctgagcccctgcgcgccagctagctgcttcttaccgataccggagaccatcatgaccacgctgaccatcaaagacctgtccgccaccgaaaccctcgacagcaagcgcatgcatgccgtgcgcggcggcctgtcgtacctgccctttgccgccgtgtatgcgccgatcaagctcgcgttcgacagcagcatcaccgccaagcaggaaatcgcgcagttgcagtccgtgaccaacctgaacggcaatggctcggccttcctcgaccatgtccgttcgcatgtggataccaaccagaacgccagcaacaatatctatcgttgagaagcttgttgagatggcgcagcgccgcgggggcgtccccgcggcgcttttgttgagcccttgcatatcggggttggagcgcgcgccagcgcgcaccacaatacagacagacttcgcggccccggcatgccttggggtatctccagcgcatcccgcccgccgccgtcgcacgcaggaacccatcgtgcctgaatccatcactgcctcgcccgcggttgcgtcaaccgccgcgccgcaccgtaccgcctggctggccgcgctggccgcctgcgcggcattgctggcaggctgcgccgatttccggccgccggtgtaccagcgcccggaaaccccggccaaggccgaatggacgcgccaggaatcgatcacggtatcgccggccgaaacggtgcagcccaactggtggctgggcttcaaggatccttacctgaacaggctgatcgaccaggcgctttacggcaactacgacatcaaggtgctggcggcgcgcatccgcgtggccaacgcgcagatcggcgaggcccgtgccggcgggctgccggtgatcgatatcggcgccggtgcgagcttcgagaagagcaccgggcagaagtccacctggacctataacgccggcgcccagctgaactgggacatcgacatctggggcaaggtcgagaagggcgtgcaggcgcagaccgccgagttccgcgccaccgaggccgactggcgcgccggctacctgacgctggtgtccaatgtatcgaccacttacttccagatcctgcagttcgacgagcagatcgagcagcaggcgcgcaccgtggccaagaacgggcagatcctgtcgacctaccaggccatgtaccagaacggcctggtgccaaagatccgggtgatgcagcagcaggcggaaatcaaccgcctgaacaaggacctgctggagctgcgccgttcgcgcgatgtggctgaaaacgcgctggccacgctggtcggtgtgcccgcgggcaatctcaaggtgccggcggggcgcctgcaggaccgcgtgcagccgcccgcggtgccggccgggctgccgtcgcaactgctggcgcgccgcccggacgtggtggcggcggaataccgcgtgctggccgcgtacaacatcgttggccaggcccgtttggcgcagttgcccaccatcagcctgaccgcgcgcggcggcaccgccagctttgcgctgagcgacctgctcaagtcattcaccttcggcttcatgcccagcatcaacctgccgatgctcgacccgagcgtgcgcgcgcgcgtgaagaccaccgaggcgcaggtgggcgtggcggaaaacgaatatggccgcaccgtgatgaccgcgttcgaagaggtggagagcgcactggtcaatgtcgacgcgcacaagaagcagcgcatcgagctgcagcagcaggttgagcagctgcgcgtcgtgtccgcgcagatcgaggcgcaactgaaggagggcgtggtctcgcagctggaagtgttcgagaccgagcgctcgctgctggccgcgcaactgcagttgttggcggtccaccaacagatcctggccgacaccgtcaccctgtacaaggcgcttggcggtggctggcccgataccgacgtgcgcaacgcggcgtcgaatccgccgcagtaagtgctgccaacggtgctgtagggcggttcaggtgatgccggcgcctgcaacgcgttgcgcaacgcgcccatagccctggccactgccccgctgcatgtgccgctgccgcgccaaccgcgcgttccgcgtcccgattgactagcctttgccgtcgcctactatgttcttagtcgcttcatcccctggcctgccgccgcggcagccgcgctgttggcttgctggaaacatggctcctgacgaagcactgatcatggaaatgccggtgaaaatggcccagggattcacgcgggaattctctcaggatctggcgcaggaattcgatgtgttcctgacgcccgtgtcgcgcccggagctgggcgagatccgcatcgacgaagacctgttcgccgtcggacgcagcgaactgccgttcgccgcctaccccgaagacctggccgcaccgctgtcgcgccggcatgcgcgcatcttcgccgagcatggcgcggtctatgtggcggatctcggcagcaagaacggcacgcgcgtgaacggcgcggcggtggcgcgccagccggcgcagctcagcgatggcgatgaggtggccttcgggccggcgctgtcgttccgggtccggctgtcgccgcgcgcggcgcagcccgagccgccgcgggtagcggtgacgttggtgcccgagcgcggcgatgtcgggctgcagccgctgcacgtggacggcttcccctacctgatcagcaaggccgacgacgccttcgcgcgctaccgcgacagctatccgcagcaggtcaactacctgtcgcggcgccacgcgcacgtgtacctcaagggtggcgtgccattcgttgaggacctgggcagcaccaacggcaccttcgtcaacggcaagcgcctggccgaccacggcgtgccgctggacgacggcgacctgatcgcctttggcggcaaccactttgtctacaaggtgcaggtccagcacaccggcgacggcgatgccaccgcgacgcattcgatgctgcagccagtcgctgcgcccgacacgccgcccgcatcccaggcttcgcccgtgcgcgacgaggatgaccgcactacctttgtcggtgccgccgattccttcctcgacatcttctgcgtcgactatgccgcgcagcaggacgacgaggtcaacgccgaggccgaggcacaggccgcggcggccacggccgcgcacgacggcgcgcaggcacgccgcaagcgcgggcgtgccgcgctgctgctggccgaaggtgccaggcagttcggcctgaacgattccgtacgcacgcggcgcgcggcgcgatggggcggcgcgttgctgttgctcgcgctgctggcgggggcggccgtgtactggcgcggtgcgccggagcgcgaagtgcaggcgctgtttgccgcaggcgatcacgcgcgcgcggcgcaggccgccgacaactacctggcgcgtcatcccggcgatgcccaggtgcaggccatcggcaccgaggcactgatgcgtgccgacgtgcccgctttcgccgccaggctgaaggccggtgatttcagcggcgccgatgccgtgctggcccggatgcgcaagctcagcgcgcacaatgccgatgcgcggccgctggtggcggaactcgactggatcggccggctcgaacgcttcaccgcgcagcgcggcgccgacacgccgatccgcctctacaccgacgaggcgccgatccggcaactgctggcgtactggaaccaggacaccaccgcgcaccagcgcgcgctcgggcgcatcgcggccgatgtgccggcgttccgcgatctctacgccgatgcgctcagcgacgtgcgtcgcctgcagaacgacgcctcggtctacctggcggcgatcgaccggctgaacaccaccattgccgccgaactcggccgcgaccgcccggaggcattgcagcccgtcatcgccgagtaccgcgagaagtatccgcgcctggccgggctggaccgcgtgcagtcagacctggaccgctacaccgcgctgatgcaggcactgcgcgcgcgccggcccgggccgctggtggcgcgccttgccgacagccgcttcgccacgccgccgttccaggcgcagttcaaccaactggccgcgcgcctgccgccgccggagatggtgcgccagtatgccggtgcggccagggcgtggcagcagggcgacagcgccgcagcgctcgcggggatcaagcagatcagcggcggcccctgggccgaggacctggcgcgcgacctgtcgcacaagcagaaggtggcggcgcagtacgccgagctgcagtccgcgcgcggcagcaagggctatgaggaccggctgctgggcttctacgccatgctcgatgccgccgatgacggccacttcgccaaggcggtcgaggccgacgtcaacggcgtgcgcgacagtgccctgcggcgcgcgcgggaactgatgggcagcgccgtcgccgcatggaagcaataccgcagcaatggcgtgatcggcagcgagcagcggctcgagcccggcatctcgcccaggttccgcgcgcaggcccggttgctgtcgcaggcacaggatgacgcgcgccagggcatgcgcatcttcacgcaactgcgcgcgggcgaaagcgccgacctggcgcaactcgccaagatcgaggaagagatccgcgccgaggccgaccagcagcggcacgcgctgcgcgagttgcgcaccgtgctcgatcccgccgtgctcaagaccaagctggagctgatcggcggtgaagacaccggcaaggcgccggagccggccgcggctgccgcggcgccacagcaagcggggcagccatgaaggacgatgcccgccagggcggcctcaagccactctccgaggcgctggaagaccacagcgccgagggcatcggcctgctgagtgccgagccgtcgcgcctggggctgctgaccatcgtcacgactttcacgctggtgttgtgcgggctggtgtggtccttcgtcgggcatgccgatgtcattgtcacggcgcagggcacgctggcgccggaatccgaggtgcgccgcttctatgccccggtggacggcgagctggccgacctctacgtggccgaggggcaaccggtgtccaaggacgacgtgctggcgcgcctgaatgcgcgcggcgcgatcgaggccgcggccaacgcgctggaagcgcagctcaagctggaagactccgagcgcgaatggaagcagttccccgacaagaaggcgctgatggaacgccgcgcggcggcgctcaagcagcagatcgacgtggccacgcgccagcacgagacccgcatcgccgaaggcaccacgcggcttgccgaacagcagcgcgcgcagttgcaggaagcgcgcagcaacctcgagaacgcccggcgcgcgcgcgaattcgcgcgccaggagcaggaccgatacgcgcgcctgctggcgttgccgggtggcggtggcgtttcgcagtcgcaggtggatgccaagcgcgccgcggcgcaggacgcggagaacaacctgcgcgtggcgcagtcgcggctgacggagctggacgcacgcctgggccgcgagcttacccaggccagttcccagctagaaagcagcggccaggacctggccgggctgcgcgtgcagtacgacgcggcgctgcgcgagatcgccaacaccgaggacaagctgcgcctgcaggtgcagaccgcgcgcctggtggcggacgcggcagcgcgcatccgcttcgagaacatcgacaaggacaacttcctgctgatcctggcgccggtgtcgggcgtgatcaccgatgtcacctccacccagcgcggcgacaaggtgcaggccaacacgccgctgggcggcattgcccccaaggatgcgcgcccggtggtgaagatcgtcatcgccgagcgtgaccgcgctttcctgcgcgagggcctgccggtcaagctcaagttcagtgccttcccgtaccagcgctacgggatcatcgagggcacgctggaattcatctcgcccgcgaccaagccgggcggacccgacaagcagccggtctacgagggccgcgtgcggctggcgcgcgactactacgcggtggccgacaacaagtatccgctgcgttacggcatgaccgccacggcagagatcgtggtgcgcgaacgccgcctgatcgacctggggcttgaccccttccgcgaggtggccggctagcgcagcggggagagactggcgcagaacatcgggacagcccggcgcgtaaccgcgcgggcgtcaaaggagccgagaaaatgactggtattgtgcgtatcgacgacgaggtgcttggcttcgaggagttcgtgcgcttgctcaagctgaccggacagttcgaagggctggtcgagcagatggtgcgcgacaagctgaccgtgcacgcggcaaagcggcagggcgtggtggtcacgccggaggagatccaggaacgcgcggaccagttccgccgcgtgcagggcctgcatcgcgccgcagacatgaatcactacctggatgcgctgaacatcagcctggacgaattcgaggcctttgtcaccgacagcctgtaccaggagcggatgatggagcaggtgtgcagcgaggccgcggtgcaggcgtactttgcgctcaactcgccgcgcttcgacagcatcgaggtcagccatatcgtggtcgacagcgagggcaaggccaaggagctgatctcgtacctgcaggatgatcccgatgcctttgccgagatggcgcgcgagcattccatcgccgacacgcgcgagcgcggaggcgagatcggcaaggtgctgcgcggctcgctcaagaccgatatcgaggccaaggtgttcaatgccgagcctggcgacctgctgggaccgttcccgtcggctgaccgttccttcttcgaagtcttcctggtgcgcgaaaaacacccggccaccctcgatagcgaggtggcggtggaagtgcgccgcctgctgcgcgaagactggctgatggccagggcgcaggaacatgtcatcgaagcccgctagcgcgagcggcgagcccgccgccccgcctgccccggaccagccggaggcaggatcggcgctggccgccttcctcgccaccgtcgagatcctgtcggtgctggtgccggaggagctggcacgcctggcggaagccgcgcaggtgctgaccttcggctttggcgacaccgtctgcaatgccggcgaagcggcgccgggcctgtttatcgtcaagtccggctcggtgcgcgtgttcaacgaggagcacggcaaggaaatcagcatgggcgtgcgcaaggccggcgaggtctttgccgatatcgcgctgctgcgcgactaccggcatgagtcgtcggtgcgcgcctcgggcaagaccgaactgctgctgatcccgcgcagcgtgggcgagccggtggtggccggcaacccggcggcgcttgcgtttatcaccagctatgtcgcgatcagctcggccggcggctttgtcgcgcggctgttcgacctgcgcggcaagctcgacaagcaggagctggaagacgccgtgcgcagcgtcggcgtcaagcgcgtggcggccggcaaggagatcctgaagcaggacggccgcgaagaccggcgcctgtacgtggtgcgccagggcacggtgcgcatcgtgcgcagcgaagagggcagcgagtacccgctggcgacgctggggcagggcgacatcttcggcgagcgcgcctgcgtgatgcggcaggagcagctggcctcggccattgccgataccgacgtgcgcctgctggtgattcccgagaagacggtgcagctgattttggagcgcaacccgcgcctgcgcgaggtgctggaagagcgcatccgcgtgctggaccgcgagttgcatcggcagaagaagctggccgaacggcgcaagcgcccggtgctgctggacctgcattcaaagcccgagctcggcgaaaagctgatccgccgcttcgcgctggtggagcaggccgaggagatggattgcggcgcggcctgcctggcgatgatctgccggcactacggcatcccgatgacgctgggcaagctgcgcgaactggccaatgtgaccacccagggcgccacgctcgacagcctggcgcgcgccggcgaagcgctcggcttcaccacgcgcggggtgcagtgcacgcgggattcgctgatggggttcgagcttcccttcatcgtgcactgggaggggtaccactacgtggtggtgtacgggatctcgtcgcgctgggtgtgggtggccgacccggccatcggcttccgcaagatgagcgccgaggagttcgagcgcggctggagcggcacctgcctgctgttcacgccgggcgagagcatgacccagctgtcggtgtcgcgctcgccgtggctgcgctttatcggctacctggcgccgtacaagaggatcctggcgcacctgtttctggccaccttcgtgatccagatgctgggggtggtcccgccgctgattatccagaacatcctggacggcgtggtggtgcaccagaacgtggggctgctgaacctgctgatcgcggggctgatcatctccaacgtgttctcgcagctgatgtctacgattcgcgcgtatctggccaacttcatggtgcgcaacatggatttcgccatgatgtcgcacttcttcaagcacacgctgtcgctgccgctgtcgttctttgccaagcgcaagaccggggacatcttcgcgcgcttccaggagaaccagaccatccgcgccttcctgaccgagtcgaccgtgaccacggcgctgaacctgctgatggtgtttatctacttcaccatcatgtttctctacaacgtcaagctgacgctgctgctgatcgccttcgtgatcccgatcgcggcgctgacggtggtggtgacgcccaaggtcaagacctatgcgcgcgaggtgttcgcggcatcgaccgatgccaaggcctacctgatggaaacgctgggcggcgccgagaccgtcaagggcatgggcatcgagcgcccggtgcggctgcgctgggagcgcaagtacgccaaggcgctggacgcgcaataccgggcacaggccttccacatcctggtggggctggtgagccagctgctcaacgccgccaccaccatcgcggtgctgtgggtgggcgcgacgctggtgctggagcgcgagctcaccatcggccagctgatcgccttcaatgccttcatgggcagcgtgctggcgccgctgatggggctggtggcgttgtggggccagctcaacgatgccggcgtggcgatggagcgcctgggcgacgtgctcgacctggagcccgagcagaagccgcaggacgtgctgtcgcgcgtgatgctgcccgacctgcagggcgagatcgtgatgaaggacctgtacttccgctacggcggcgaagacacgccctatgtgctggagaacatcagcttcgccatccgccctggcgagatggtggccatcgtcgggcgcagcggctcaggcaagactacgctggccaagctgctggtgggcttctacaagcctaccgagggctcgatgacagtggacggctatgacctgaacgtgatcgacgcggcgttctaccgcgcgcaggtgggctacgtgatgcagtccaacctgctgttctcggggaccattgccgagaacatcgcctgcggcgacgacagcccggaccggcgccgcatcgaggaggtggcgcgcatggccgatgcccacgcctttatcagcaagctgccgctgggctacgagcaggtggtgggcgagcgtggtatcgggctttccggcgggcagatccagcgcctgtgcattgcccgcgcgctgtaccacgacccgcgcctgctggtgttcgacgaggccacctcggcgctcgacacgcagtcagagagcaacatcctggcgaatatgcaggagatcctgcgcgggcgcaccgcggtcatcatcgcgcaccggctcagcaccatcatgcaggccgataagatcctggtgctgtatgaaggcgccatcgtcgagcagggccggcatgaggagctgatcgagcgcaagggcatgtatttccaactggtgcagaagcaactgagcgcagcatgaagctatacaaccagggagccacccccgcctcggtcacgtccccggtgtcgttcgccgggctgatcgagaagatcgagatcctgcgttccacgctgcgctggtcgtcgcggcttgaccggccggagatcgagaagctgctcaagcaggtcaccacgctgcgcgacgaggtgatggggctgtcgcacaaggagcgcttcgtgcaggccgcgtcggccgaggcggccccgccgcaggaagaagtcgagcgcatgccgcgcgcgcgccggcaggcactggttgagcgcagctttattttcgaagggaccttcggcgacaaccccaagttgctggaggcactggagattgccgagaaggcggcgccgaccgacctgccggtgctgatcgatggagagagcggcaccggcaaggagctgatggccaaggtgatccatgccaatggctcacgcaccgacaagccgtttatctcggtcaactgcggcgccatccccgacagcctgcttgaatccgagctgttcggccacaagaagggcgccttcaccggcgccagcaatgaccgccgcggcaagttcgagagcgcgcataccggcaccatcttcctggacgagatcggcgagctgccgctgaccgggcaggtcaagctgctgcgcgtgctggaggcgcacgagatccagcgcgtgggctcggacgaggcgatctcggtcgatacgcgcatcgtcgcggcgaccaacaaggacctgcgccgcatgagccaggccggcaccttccgcgaagacctgttctatcgcctgagcgtgatccacgtcagcctgccgtcgctgcgcgagcggcgcgacgagatcccgctgctggtgtcgtacttcagtgacgaggccgccggcatgctcaagcgccggccactcaagctgacgccgcggctgcgcgacttcctgctgcactacgactacccgggcaatatccgcgaactgcgcaacctgatgtaccggctgagctgcctggccggcgacaccgccgacctggcccaactgccgcaggacatccgccccaggcccgccgcactggcggtggtgggcaatggccccgccgctgccgacattgccatggcgacgtccctcagcgaagccaagcgcgccgccagcgacgaggccgagcgggccttcctcgaacggggcttgcaggaggtcggcggcaccgtcgccgaactggcgcggcgcttcgacatgaaccgctcgcacctgcagatgctgctgaagaagcacggcatccactcgaaggatttccgcgccaaccggcaggccgaaggcggcaaggggtagggcggcgaggccgccggcggtcgtgccttcaggcgtccagctcgggattgaccagggtcttgtcagagccgtacgggtccgccgcacgcagcaccaccaccgacacgttgtcgcggccgccggcatcgagcgccatctgcaccagcgtcggcgcggcctgcgcaacgtcctgctgcgccagcaccgccgcgatgtcgtcatcgtcgacctcgttgctcaggccatcgctgcacagcaggtacacgtcgccatcggcgacctcggtcagcagctgctccggcgccagcgtcggggccgcgccgacggcgcgtgtgatggtgttctgcgcgggatggtggcgcgcttcttccggggtgatcagcccgcgcgccagcaggcgctcgacctggttgtggtcgcgcgtgaggcgcgcgaactggccgccgcgcagccggtacaggcggctgtcgccggcccacacgcaggcgcaacggcgatcgcccgccagcattaccaccaccgtgctgccgatgcagcgcacgcccaggcgcgccgcttcatcgaccagcgccaggttcacgccctgcagcgccgcgcgcgtggcgtcgacccggtcttccagccggggctgcggcggcagcgtggccagcgcctggaccaccgcctggctggcgaagtctcccacggcatggccgcccatgccgtcggccactgcccacaggtcctggctgggcagatccaggcaagcgtcctcgttgcgctcgcgcacgcgcccgacgtccgtgcatgcggccgaggtccactggaagtgcgagtcgaaacccaatcttgtctccggtccgcgtcaagccccggaccagccggggcactgccacggcggcgctggcgctcagatcagcatcagatcagcctgccgtcgttcctcgcgccctggtcgccctggacattgatgttggcgtttggcgcgttgttgcggatatcgatgttctggaactggttgttcatctgatcagcatagaagctgtagttgatctcgtaaaagttgatcaccgtcccgagcggcagcggagacgagggcacgaacgggcggatccacccgaacacccactgcccgccggcgccgcgcacgcgggccatggcggcgggagcaagttcgcggcagctggcgaggtcgttgattgcaagggtggccatgttcggtctccggtggatgtggcgtggcgccgggggcggtaccggtattgagcaaggcgcgtgccacagcatgggtgtggcagcaggtcgactggaaacccaagtccggcgcgggctgcagggcggggcggggacaatggggcccaccccggcagtccagccacgttggcctcgacccgacacccggccagccagtgtcgggatggacccaccacagcgcaagcatcgcgcgatccctgccgccagcccgcccaggccgcgcggcgcggggcgaatggtggctgccagccaacagagttgccgccacgcggttggttgccatccgacactcgatcccatccaaaacccccggatttccgccaaaccgttgtcgggccgtgcctccctggtattggcatggttgatgcggttggtctggcacgaagcagcaatgcttgcagcaaccagacacaccgaggccagccatgaacatccaggaacaacaagaacgcgctaccggcagcgacgatcgtttcgcggacccgctgccgctcggcgcccacctggtcaccgaacgccacggctacgcccatcatgggatctacgccggcgccggccgcgtcatccactacgccggtttcgcgcgctccctgcaggccgcgccggttgaagaaactaccctcgaagccttcgccgccggattcggcatcgccgtcaggccggagccctgcgcccgcttcgccggccgccaggccgtcgaacgcgcccgttcccgcgtgggcgaaaacgcctaccacttgctgaccaacaactgtgagcatttctgctcctggtgcctgtccggcgaaagccgcagcgagcaggtggaaacatgcatgcgccgcccgcgcgccgcgctgcacatcggctggctgctgctgggcgcgctgctgcaagcccaactgggcggcctgaacctggacctcgcctgaaccgcgcggccatcaccgaatcaaggagcctgccatgtccggactgatcgactgggaattgcgctgcaacctgcgcggacaagcctgccaccgcagctgcgccactgccgccgccaactgcgcccgcggccaccaccggccggggcgccgcgccctgcgccatgccggccggccgacgcgcctgccatcgtccggccgccttgccgggcgaggccgccgggacgggtccgccactgccggcgagccgggccggtgcggattttgatatactccgggccgtctccaggatcaccgcgcccgcggttcccgatcctgacagtcctgtccctcgccgtagttcaatggatagaacgagcgcctcctaagcgctagatacaggttcgattcctgtcggcgggaccagtccacagtccgtaccctgtggttcccagctgtgccctctccccaactcaatctaggtattcccccggaatttcagcccaagaagatggcgccagcctcgccgtcgagggcctggattgacaggtgcttcatgctacgatcctccaaactccggagcgctcgccatggaactgaaatacaaaggccgagagatctcaatccaggccaaaaaggactcgggcggccagtgggactggtcatatggcatccgcggtcacggacaccggcacaacaccggggcgcttgctcccacggaatcggtcgcgatcgataacgcctatgcgtgcgcgaaacgggagattgaccaagccacttcaggcgacgccaacgactgacacttcctgaatgccactagtggagaaagacatggatctccaagggttcacgtattaccgcgaccactggtatgaagcatcggcaacgtcccttggcgttggcggcccctggcaaggtgaggtgaccatctgcgcgaaagcggcggatggcgcgccactcaaggtcttcgatcaccatcttgttccgggccagttcttcagcgaaggcgaggcatggcagcatgcctcggactgggccaggaagcagatcgatgcgcgctttggctagcacgcgcgccagtcgctgcgcaagtgctcatgccgcactgcgttcggcgatcagcacgttcgcgggaatcttcaggtcacggtgcagccgccggatcatggccagactcagcgcgcgcttgccattgagcacttcatatacgcggttgaggttacccaggtacggttgcatgtcgcgtggcgtgaggccagcttgttccatgcgaaagcggatcgcggcgatcggatccggcagatccatcggaaagtgcccggcttcataccgttccaccagcatggagaggatttccagcttgtcgccctcaggcgtgtcgggcacagggtctgcgtcgaccagggcggagaccgcggccagcgcttcctggtagtcggcttcagtgtgcagggggcggatatccatggtgatcactccatttccgcggtggcggcgtctatgcggtcatagtcgagatgggtgccgatgaacttcacgcagacgacccccaaccggtatgcgacagcgacgataagccggtacttgttcccgccgagattgaagaccacgcggttgctgccgacgaagctggcactggcgtagcgtgccttgatgtccctgggcgcggtccaggccgcgcagcgggcttcttcatgccaggcaagcagcggttgcctggcttcggggtggaacttgctgaattgcagcaaagacctcttcgctatgattcgcatgtgggcaatgccagtcccaaaatgggactgcggcaagagtggatgaggggtcatccactgccgagcatacctacgatcaatgcgcgctagtcttcgaaaacagctgaatgacggcgacgccggcaataatcagaccaatcccagcgcaagccgccaggtccggcacctgccggtacagcaccaccgcgatcagcgataccagtacgatcccggccccgctccagatcgcataggcaattcccaccggcactgtccgcatcaccagcatcagcaaatagaacgccgccacatagccggtcacgaccagcacgctggggaccagccgcgtaaagccctgcgacgccttcaggctgctggtggcgatgacttcggcgacgatggcgagggcgaggagcaggtatccgttcatgggagcgtacaagtgggtgggccgaaacgggccgaagccggcatcttagcgctcccgcatgttgcgccaaagccgcgtccctccgttgcggtggttgtgcaaagcggtgatggaggattgaatgtggctataacgaagagaacaagcgggcgcatggccggcccgcggcacaagtcctacagggcagtcgcggtagttggcccgaccaagccggcacgaaccccacgatgccggcggcgggcatgggtaaggggagcggtatgcatcacaatggcatcgacggcacgtccgccgggacgtcttcgcagccgggggacggggggcccgcgccggacgcgaatccgtggcaggacaccatcgccgcggcggaccaagcactggaagaggcttcgcgcatccaacgcggcgtgcagcacaacctgaagctgttgcaggaggtgcggtcgctgcgcgaagagttgcgcaaggcccatgcggaggtcgatcgctaccggggcatgcatgcccgggtggtggtcagcatgcgtcagctggacgaagaccatgtgggggaaatgagccggctccaggcggcgaacgagatgctgcaggtgcgtcatcgcgtctacaagctgatggccgagcactacgcgcgcgcggcgttgaacctggatccggaaaccttcgcggcccatcgcgaccgcgtgctgcagcatgtcttgttccagcgccgcaggggcgtgtcgtccgacgatatcggctacgcggacgtggctttcctgatgctctagcggcgatgctcaggcggcgcgccggcgcagcacgtggaacgccagcatgccgcccaccacgccccagaacgcggagccgacacccgccagggtcatgccggacgccgtgatcatgaaggtcagcagcgcggcttcgcgctcggccgggatttgcatggccacggtcaggccgttggcgatcgagcccatcagcgcgaacgcggtcacgcccaccaccagcgcttgcggaaaggccgcaaacagcgccgcgatgctggccgccagcgtgcccgcgaccaggtagcccacgccgcagaccacggccgcggtatagcggcggttgcggtcggggtcggcctgcgggccggtgcagatggcggcggtgatcgccgccaggttgacgccgtgcgagccgaacggcgccagcagggccgaggtcaggccggtgatcgagatcaggcgcgaggccggcacgtggtagccgtcggcttgcagcacggccagcccggggatgttctgcgaggccagcgccacgatgaacagcggaaccgccatgctgaccaaggctgacagcgagaatgccggcgtggtccacaccggcaccgccaacgccagccgcacgcccgagaaatcgagctggccgagcacgccggcgaccaccgccccggtcagcagcacccctggcaccgcataggccggccacaggcgccgcccgagcaggtaggcggcgaacatcgccagcagcagcacggtctggtgctgcgcctgcacgaacacatccacgctgatgcggaacaggatgccggcgagcagggctgacgcgatgctggcgggcagggcgcgcatcagcttgtcgaaccacccggtcatgccggccgcggccatcatcagcccggccagcaggaaggcgccgatggcttccgcgtagggcacgccgggcaggctggcgatcagcagcgccgcgccgggcgtggaccaagccaccacgatcggcacgcgcagcgccagcgacaggctgatggtggtgatccccattcccatcgacagcgcccagatccaggacgaaatctgggcatcggtcaggtgggcggcgtggccggcctggatcatcagcaccagcgaactggtatagccggtgagcgtggcgaccagcccggcgaccagcgcggacacggacaggtcggacaatttcagcgaagcggtggtcatgaaggtggcagcaggccattggcacggccgacatcttcgcatgagtgccttggtcgtaccaatttgccgcggcggcgtccagaaatcgcggttgacggggctttcccttacggacttttccgactggagcgggcagggggggcgttgttatgctggcttcgtgccttgcgagcagggcaccgaggagagactcttgggcccgcagtgcgcgggcccttcttttttggggccagccttggcccggccccggtcgtctacaatgcgggctgccgtgccacgccagccctggctgccaggccgtccctcctttccctcgtcgtctcgtctttttcccatggccctgttttccattaccgacgcccagcttgccttcgggcacgtggccctgctcgatcacaccgacttttcgctggaggccggcgagcgcgtgggtttgatcgggcgcaacggttcgggcaagtcctcgctgctgaagatcgtggcggggctgtcggcgcccgacgacgggctgatcgcgcgccagagcggcgtgaccagcgcctacgtgccgcaggagccgcagttcgaggcgggcatcaccgtgttcgacgcggtctcgcagggcatgggcgatgcgcacgacttgctggtgcgctacgaggccgccgccgaccgcgtcgccgagaaccacgacgacgaagccgcgctggccgaattgcaccggctgcagtccgagctcgacgccgccggcgcctggcagctgcgcacccgcgtggaaaccacgctggcgcgcctggggctggattcgcacacgcgcgtcgaggcactgtccggtggcctgcagaaacgcgtggcgctggcgcaggcgctggtggccgagcccgacatcctgctgctggacgagcccaccaaccacctcgatgtggaagcgatccgctggctggaagacctgctgctgggcttccgcggcagcgtgctgctgatcacccacgaccgcgccttcctcgaccgcgtcgccacccgcatcatcgaactggaccgcggccggctggtgtccttccccggcaacttcgccgcctaccaggcgcgcaaggaagagatgcttgccgccgagcaggtcgagcaggccaagttcgacaagctgctggcgcaggaagaggtgtggatccgcaagggggtggaggcgcgccgcacgcgcagcgtgtcgcgcatccagcgcctggtggcgatgcgcaacgagcgcgccgcgcggcgcgaggtgcagggcaatgtcaggctggaggtgtcgcaggccgaccgctccggcaagatcgtggccgagctgaccgacgtcagcaaggcctacggcgacaaggtggtggtgcgcgacttcaccgccaccatcatgcgcggcgacaaggtcggcctgatcggccccaacggcgccggcaagaccacgctgctgcggctgatcctgggcgaactggcgccggacagcggcaccgtgcgcaacggcagcaacctgcaggtggcgtacttcgaccagatgcgcaccgcgctggacctggagcgctcgctggccgacaccatcagcccgggcagcgactgggtcgaggtcaacggccagcgcaagcatgtgatgagctacctgggcgacttcctgttcgcgccggagcgcgcgcgttcgccggtcaagtcgctgtctggtggcgagcgcaaccggctgctgctggcgcgcctgtttgcgcgcccggccaatgtgctggtgctggacgagccgaccaacgatctcgacatcgacacgctggaactgttggaagaactgctgcaggactatggcggcaccgtgttcctggtctcgcacgaccgcgccttcctggacaacgtggtgacctcgaccctggccgccgagggcgatggcgtgtggcgcgagtcggtgggcgggtattccgactgggtcgagcagtcggcccgcagcgcggcgctgcaagcggcgcgcaagccggagcagaaggcggcagagccggtgaagggcaaggattcgcgcgaagcgcgcggcgccaatcgtacggtcaagctgtcgtacaaggagcagcgcgaactggacggcctgccggagcgcattgccgcgctggaaaccgagcagaaggtgatctcggcacagctcgcggacggctcgctctatgtcagcgatgcgcccaaggccgcgcagctgggcacgcggcacgacgagatcgagatggaactgctggaagcgctggagcgctgggaagtgctggaggcgaagtcgaagggcgagggggcctgagggtcaggcaagccgaccctcacccgcaccaggccaacaccatgttggtcaggtcgaccatgaaccccggccgcaggtaacccacgaacccaagcgccagcaccccggccagcaccgccagcccggctgccttcatcacgcgcgcctgggtcgtgctcatcatgccgccgccggctgcgcgcgcaccagcgcctgctcgcggatcggcaggttcaccagcgcggccaccacgcccagcgcgatcgcgatcagccacacggtgttgtagccgccggtgcggtcgtagaggaagccgcccagccaggcacccaggaaactgccgatctggtgcgagaagaacaccacgcccgatagcatcgacaggtatttcacgccgaacacctgggcgatgatgccgttggtcagcggcaccgtggacagccacaggaagcccatgaccgccgcgaacacccaggtgctggccaccgtcagcggcagcagcaggtagctggcgatcaccaccgagcgcgtcacgtagatggcggacagcaggtagcgcttgggcaggcgctgccccagcgcacccgcggtataggtgccgaatacattgaacagcccgatcagcgccagcgccacgacggcgacttttgggtcggtcaggccctggtccttcaggtagggcgccaggtgcacgccgataaacaccacctggaagccgcacacgaagtagcccagcgtcagcagctggaagttgcggttgccgaaggcttcgtgcacggcctggccgatggtctggtggtggccgccggtgtgggccgcttcgcgcggctcgcgcagcgtcagcgccagcggcagcatcacgcaggccatcaacgccattacatagagggcgttctgccagcccagcccggagatcaggccctgttccaccgggatcatcaggaactggccgaaggagccggccgcggcggcgatgcccatggcccagacccgcttctcggggctggccacacggccgatcacgccgtagacgatgctgtaggtggtgccggactgggcgatgccgatcatcacgccggcaccagtggcaaaggcggtgccgctggtggccagcgccatcaccaccagcccggccacatacagcgccacgccgaccagcatgatgcgcagcgcgccgaacttgtcggcgagcgccccggcaaagggctggctggcgccccacatcaggttctgcagcgccagcgcgaaggcgaaggtctctcggttccagccatgggcctgggtgatcggcaggttgaacaggccgaagccgtgccggatgcccattgaaagggtcacgagcagcccaccgcacacaagtacggtggtcagggagagttgtcggttctgcatgtcttggctcgatgtgcggcagtcccgccgggtaagcgcggtgccgacagggattgtgtgcttgttgttgtccatgccgggacggcaatcgggcttgccggggccgggtgctggcgagtttactccggctcgggaaaacgcgtacggcgctgcccgcgctgccggcgccctggcaaaaagtggcggcggcccggcaaaaccggcgccagcgcgggtcggcaggccaagcgcctttttggcgggattgccgtcgcccgcttccattacaatgcagtgcccggtgccccggcgcgtgcacagttgtgcgcctcatggcagccgggaccatcactttcgtagcgactccatggcgagcaaaaccagtcagtacagcgaatcttccatccgggtcctgaagggcctggagccggtcaagcagcgtcccggcatgtacacccggaccgacaaccccctgcatatcgtgcaggaggtgatcgacaacgcctcggacgaggccctcggcggccacggctccgagatcctggtgaccctgcatcgcgacggcagcctcagcgtggaagacgacggccgcggcatcccggtgggcatccacccggaagaaggcgtgccggtggtcgagatcgtcttcacccggctgcacgccggcggcaagttcgacaagggcaagggcggtgcctatgccttctcgggcggcctgcacggcgtgggcgtgtcggtgaccaatgccttgtcgacgcagctggacgtgaccgtgtggcgcgacagcatgtgctcgacgctgaccttctccggcggcgacgtgaccgtgccgctggcctcgcgcaagatcgagcggggcgagaagaagagcggcacccgcgtgcaggtgtggccggatgccaggtatttcgactcggccgcgatcccgctggccgagctgcagcgcctgctgcgcagcaaggcggtgctgctgcccggcgtcaaggtcacgctggtgaccgagaagaccggcgagcgccagacctggcagtacgaccagggcctgaagggctacctggtcgaggcgctggcgcagggcagcggcgcggaattggtgatcccgatgttcgagggcgagcattttgccgaccccgacgccaatcccggcgatgaaggctttgccgacggcgaaggcgcctcctgggtggtggcctggaccgaagacggcgcgccggtgcgcgagtcctacgtcaacctgatcccgacgccggccggcggcacgcatgaatccggcctgcgcgaagggctgttccaggcggtcaagagctttatcgagatgcacgcgctgcagcccaagggcgtcaagctgatgagcgaagacgtgtttgcgcgcgcctcgttcgtgctctcggccaaggtgctggacccgcagttccagggccagatcaaggaacgcctgaacagccgcgacgcggtgcggctggtctccaccttcagccgtccggcgctggagctgtggctgaaccaccatgtcgagtacggcaagaagctggccgagctggtgatccgccaggcccaggcgcgcacgcgcgcggcgcagaaggtcgaaaagaaaaaaggctccggcgtggcggtgctgcccggcaagctgaccgattgcgagtccaccgacgtgacccgcaacgaactgttcctggtcgagggcgactcggccggcggctcggccaagatgggccgcgacaaggagttccaggccatcctgccgctgcgcggcaaggtgctcaatacctgggagaccgagcgcgaccgtctctttgccaacaacgaggtgcacgacatcgcggtggcgatcggcgtggacccgcacggcgccaacgacgagcccgacctgtccaacctgcgctacggcaagatctgcatcctgtccgacgcggacgtggacggcgcgcatatccaggtgctgctgctgacgttgttcttccggcacttccccaagctgatcgagaccggcaacgtctttgtggcgcgtccgccgctgttccgcgtcgatgcacccgcgcgcggcaagaaaccggcgcagaagctgtacgcgctggacgaaggcgagctgctggccatccaggacaagctgctcaaggacggcgtcaaggaaaactcgtggcagatttcccgcttcaagggcctgggcgaaatgagcgccgagcagctctgggaaaccaccatgaaccccgacacgcggcgcttgctgcccgtgtcgctgggcgaatacgacctgccgcagaccgtcgagatgatgaatatgctgatgggcaagggcgaggccgcacagcgccgcagctggctggaagagaagggcaacgaggtcgaggccgatatctgagcgaaacctgagcggaaagcggcggccggtgattgggtagataatcccccagtctgcctggccgtcattcccgacggccgccaacggacagtaatctggaacgcacgatgacgacgagaactcccggcaaaccatggcgcaaggcggcggcagccgtcgtggcgctggccgggctcgccttcgtgccggcggcgcatgccgagctgtggggctttatcgatgccgatggcgtggcgcactttgccgaccagaagctcgacgcgcgctacaagctgttcatgaaggatggcggcaagctggataccgcgcgcctggcggcgcggcagtcgcaggcggccgctggcgctgacatcgacctggagcagcacaagctgtaccgctacgtcgtcaaccatcccaatatcaagaccgtcgagccgctgatccaccagatcgccggcaagcaggatgtcgatcccgcgctggtcaaggcggtgatggcggtcgagtcgggcttcaacccgggcgcggtgtcgcccaagggcgcgatcggcctgatgcaggtgatccccgacaccggcgcgcgctttggcgtgaacgccgatgcgcgccgaagcatcgagcagaagctggccgatccacgcaccaatatcaccgcgggcgtgcgctacctgagctggctgatgcagctgttcccgaacaacctggagctggtgctggctgcctataacgccggcgagggcgcggtgcagcgctacaacaaccgcattccgccttacccggagacccggcagtatgtcagcaccgtgctgcagttttaccggctgtaccagccgcagcagggcgcggtgctcaggcgcgccagcgccagcgcggacggcccgcgcgtgaagatggtcatcggcgggcgccgcgccatgccctgaccggcatacccgaacaacaagcaacccggcgcgccggcagttcaacgtggcgcgccgaattcttgcctacccatggaacaacaagacatcacgtttcaacctgaagagccggccgattcgctgacgctggcgcgctacgccgagcgcgcctacctggactacgccgtcagcgtggtcaagggccgcgcgctgcccgaggtggccgacggccagaagccggtgcagcgccgcatcctgttcgcgatgcacgagatgggcctgcgcgccgacgccaagccggtcaagtccgcgcgcgtggtcggcgatgtgctgggcaagttccacccgcatggcgaccagtccgcctacgacgcgctggtgcgcctggcgcaggacttctcgctgcgctacccgctgatcgacggccagggcaacttcggctcgcgcgatggcgacggcgcggcggcgatgcgctacaccgaagcgcgcctgacgccgatctcgcggctgctgctcgatgagatcgatgaaggcacggtcgatttcgcccccaactacgacggctcgatgcaggagcccaggctgctgccggcgcggctgccgttcgtgctgctcaacggcgcctcgggcatcgcggtgggcatggcgaccgagatcccgccgcacaacctgcgcgaagtcgcagcggccaccgtggcgatgatccgcaatcccaatatcacgctggccgagctgctggcgctgatgccggggccggactacccgggcggcggccagatcatttcgccggcgtccgatatcgcccagatctacgagggcggccgcggcagcctgaaggtgcgcgcgcgctggaccatcgaggagatggcgcgcggccagtggcagctggtggtgaccgagctgccgccgaacacctcggcgcagaaggtgctggaagagatcgaggaaatcaccaaccccaagatcaagaccggcaagaaggcgctgacgcaggaccagcagcagctcaaggccaccgtgctggcagtgctggatgcggtgcgcgacgaatcgggcaaggatgcgccggtgcggctggtgttcgagcccaagagcaagaacgtcggccagcaggagttcatccatacgctgctggcgcataccagcctggagtcgggcgcgccgatcaacctggtgatgatcggcaccgacgggcgcccgcgccagaagggcctgcgcgagatcctgtcggagtggatcgcgttccgcttcgacaccgtcacgcgccgcacgcgccaccgcctgggcaaggtcgaggaccgcatccatatcctcgaaggccggatgctggtgctgctcaatatcgacgaggtgatccgcatcatccgcgagagcgacgagcccaagccggcgctgatcgaggccttcggcctgagcgaccgccaggccgaggacatcctcgaaatccggctgcgccagctggcgcgcctggaagcgatccggatcgaaaaggaactcaaggaactgcgcgaggagcaggccgacctggacgtgctgctcaagtccgagaccatgatgcgccgccgcatcatcaaggagatcgagaccgacgccaagcagtacagcccggaagacaaggacccgcgccgcacgctgatccaggaagagcgccgcgccgcggccgaagtgcgcgtgatcgacgagccggtgacggtggtgatgtcgcagaagggctgggtgcgcacgcgccagggccatggccacgacgcgcagcagttcaccttcaaggccggcgacgcgctctacggcaccttcgaatgccgtaccgtcgacgtgctgctggtcttcggcaccaacggccgggtctattccgtgccggtcgccagcctgcctggcgggcgcggcgacggggtgcccatcaccacgctgatcgagctgcagtccggcagccaggtcgcgcacacctttgccggcagcgcggagcagcgcatgctgatcgccaccgcgggcggcaatggcttccagaccaaggtcggcgatatgatcagccggcagaagggcggcaagtcgttcctgacgctggatgacggcgacacgccgctggcgccggcgccgatcggcgacgaggccacgcatgtggcctgcctgtccggcaacggccgcctgctgctggtggcgctcgatgaagtgaaggtgctgtccgccggcgggcgtggcgtgatcctgatcgagctggaacccaaggagaagctgctgcaggcggtgggcgtcggcgcgccggggctgatgctctcgggcgcggggcgcggcggcaagccgacctcgcagaagctggcaggcgtggccttgcaggcctacgtcggcaagcgcgcgcgcaagggcaaggcgatcgaggccaagctcaaggagccgcgcatcgatccggtgcgcgtggagccgccggctggcggcaattgattagctgaatcgtcagcccaggcgaatgtttgctcccctctcccgcaagcgggagaggggagcaaaccagcgactcaatccactcccacaaatcccccggtctgatgcgcccacagccgcgcatacagcccgccgtgcgccagcaattgcgcgtgcgtgccgctttccacgatatggccgttgtccagcaccaccagccggtccatgcgcgcaatcgtcgacagccggtgggcgatggcgatcacggtcttgccctgcatcagcgtttccaggctttcctggattgccgcttccacttccgaatccagggccgaggtggcttcgtccaggatcaggatcggcgcattcttgagcagcacgcgcgcgatggcaatgcgctggcgctgtccgcctgacagcttcacgccgcgctcgccgacctgtgcctccagcccggtattgccgtgggcgtcgaccaggtgcggggtgaattcgtcggcgcgggcgcggtgcagggcttgctgcagttcagcctcggtactggagggtttgccgtagagcaggttctcgcggatcgaccggtgcagcagcgaggtgtcctgcgtgaccatgccgatctgtgcgcgcaggctttcttgcgtgaccgcggcgatgtcctggccgtcgatcaggatgcggccgcgctcgacgtcgtagagtcgcagcagcaggttgaccagcgtcgacttgccggcgccggaggggccgaccagcccgatcttctcgcccgggcgcaccgtcaggtccacgccttcgatgacgcctgagcccttgccatagtggaatcccacccgctcgaagcggacctcgccatgggtgacgcgcaacggcttcgcgtcggcgcggtcggtcaccacgcgcggcacggctatcgtcttcatgccgtcctgcacctggccgacgttttcgaagatgccgttgaccacccacatgatccagccggacatattgttgatgcggatcaccagcccggtggtgagcgcaatcgcgccggtggtgacgtgcccctcgctccacagccacagggccagccccgtggtgccggcaatcagcgcgccgttcatggcggtgatggtgatgtccatgccgctgatcatgcgcccggccagccgcgacttctcggtctgctcggacatggcgtcgcgcgcatagtcttcctcgtgacgggtgtgggcgaacagcttgagtgtggtgatattggtgtagccgtcgacgatacgccccatcagccgggaacgcgattccgtggcgaccaccgaacgctgcttcacgcgcggcacgaagtggagcagggcggccacgtagcacgcgatccacagcagcagcgggatcattagccgccagtcggcctgcgcgaacagcaccagcgagctgatcgcgtagatcaccacgtgccagattgcgtccaccgcctgcaccgcggaatcgcgcagcgagaagccggtctgcatgatgcgctgcgcgatgcgcccggcaaaatcattctggaagaacgacaggctctgcttgagcacgtagcggtggttctgccagcggatcaggttggccaggccggggttgatgacctggtgcacaaggacgtcgtgcaggccgaagaagatcgggcgcagcagcagcgccaccacggccatccacagcagctcgttgcgatgccggctgaagaactccgcgcctggcgtggtctgtgccatgtcgaccagccggccgaggaagctgaacagcgccacctcgatcagtgcgccgaccagacccaccagcaacagcagcgcgaacacaccccacacttcgcgcaggtaccaggcataaaagcgccagacctggccgggcggctcgtggtcgggcatgccccggaaggggtcgatcagtctttccaggcgacgcaacatggcaggtttcccgttgtgcccggcgcgccctggcgtcttcgtgggaggtgggggcgcgcgtgcggcggatcagacacaacatgatacgcgccttgcacaatggaaaagccccgccaggggcggggccttgtcagaaccgcagtgcggaaacttctgaatggtcagggatggtggatcaccatatgcgtgaacggcggcacataggcctgcagcgtcacgaacaggcccaccaggatcgccagcacgatcgagtggaagaacacgtagcgcaggatgtcgccttcgtggccgtaccacttggtcgcggtcgaggccaccacgatggactgcgcatcgatcatcttgcccatcacgccgcctgagctgttggccgaggccatcagcaccggcgacaggcccagctgctccgccgtggtcttctgcaggccgccgaacagcacgttcgaggccgtgtccgaaccggtcagcgccacgcccagccagcccagcatggtgccgaacagcggatagaacacgccggtgtgggcgaaggccaggcccagcgtggcatccaggcccgagtagcgggtcaggtagccgacgccgaacatcgcgcagatggtcagcagcgagtagcgcaccagcttgatggtttcccagtattccttgaacaggcgcggcaccgagtagcccatcagcaggccgccggcgatggccgagacaaagatgccggtgccggccatcgacagcacgttgaagttgaagaccgcgccttcgatgacgtccttgggcacgaccggcggcaccttgacgatggccttgtccagccccgggatcgggaatttccacgcccacaggctatccatcagcttcttgaactcgggcacgccccagacaaagacgaacaccgtcaggatcacccacggcatccaggccttggccaccgagatgccggccgaggcggcgctggcgcgggcatcggcttcgagcgcttcgggatggtcgaccttggagtcgtcgtggcggcccaggatcctggtcgaggtccagatctccttcggatgccagaccttcaggaacagcgtcagcgagcccatcgacaccagcgcggcgatcacgtccaccagccacggtccgtggtagttggacaccaggaactgcgggatcgcaaagctcacgcccgccaccaggatcgccggccagatcgccagcatgccgcggaagccggcaaaggcccagatcagccagaacggcacgattacggagaagaacggcagctggcggccgatcatggccgacaggtcgagcaggtccagcccggtcaccgacgccaggccgatgatcggggcgcccagcgcgccgtaggccaccggcgccgtgttggcgatcagcgccaggcccgaggcggccagcggcgagaagcccaggccgatcaggatggcgccggtcacggccaccggtgtgccgaagccggccgcgccctcgaagaaggcgccgaagctgaacgccaccagcagcagctgcaagcggcggtcctcggtgatgccggagatcgagttctgcaagaccttgaatgacccgttaagggttgtcagccggtgcaggaagatgatgttcagcacgatccagccgatcgggaacagcccggacacgatgcccagccccgctgccttgccggccattgccgccggcatgccgaacaccgtggaggcgaccacgatgccgatcagcaacgccagccccgccgccaggtgggcctgcatatgaaagaacgccagcgctgccagcagcacggcgacgggaacgcccgcggcaatggtcgacagcgccatattgcctagcgggtcatagacttgactccacacgatcgatgtcctcctcaggttggctcaggcgccgggacgatctgcgtgccctcggcgccgtgcatgcgctttgccccggcgagcggcatccgccgcgcgcgggaaagaaccagcgattgtaggaacgggttccgtgttcgctgtcgtatattgcgtcatgcctggcatgagccacattcagggatcagggtttccctggggggcattgcggcgcacgtggtgccttccaggcactccggcgagagtactctaaacggcgcctgttgcaaaagtctgcgtgcctgccaccggcttgcatgaccggcccggcagccatgccgggactggcataagcgccggcgctcggcgcatactggcgggcgtcatgccgcaggcgcgctgccgcccgcatccaaccattgaatgaggctgcccatgaccgaattccttcccccctggcctttgctgaccgcattcgtgctggccagcctggcgctggccatcacgcccggcccggccgtggtctatatcgtcacgcgcacgctggcgcagggccggcaggccgggctggcctcgatcggcgcggtggcgctgggcaacctgggcaacgcgatcggcgcctcgctggggctggcggtgctgttctcggtatcggcgctggcgttttcggtggtcaagtacgcaggggcggcctacctgatctggctgggcatccgcgccttgcgtggcggcgccgcggcggctgacggcggcacggttgaagcagcgccacgcagcctgcgccaggtggtgcgcgacggcttcgtggtggcgctgctcaatcccaagaccgcgatcttctttgccgccttcctgccgcagttcatgaacccggcaggctcggcgctgacgcagagcctggcactgggcgtggccttcgtgctgatcgccgcgaccacggacgcctgctacgtgatggccgccgccgcggtgatgccggcactgcgccgcgccggcagggcgcgcgcgctcggccgctacctgaccggcgcggcgtttatcgggctgggggtatttaccgcggcgtcgggctcgcgcgcggcgaagtaaggcaggacggcaggaaagaaaaaactgccgcggctcagcgcagcggcagttccaggatgccgtccgcggcggggcgggcgcgcattgcgctcaaccagcgctccaggttggggcgcgactggtgcttgagcggcagccccatccagcggtgcgcggcgcaggccagcgagatgtcggccatggtgaagcggtcgccgccgatgaactcgcgcccggccagcgccttgtccagcagttcggccagcggctcggtgcgctcgcacgatgccttgatggcagcctcgtcgcgctccgccttcggcttgcgcaccaggttcaggaacgccgtcaccatggccgggctgaaggcggtggtctgccagtccatccagcggtcggccgaggcgcgtgccttgacgtcctcgggccacagcgtgccttcgccgtagcgcgcgcacaggtaccgcacgatcgcattggattcccacagcacgaagggctcgccgccgacatcggtgccgcggaaatcctcgatcacggggatctggcggttcgggttcaggcgcacataggcctcggtgtcgaggtcgcccttggtcacgccgatatccacgcgctcatggtccaggtgcagctcgcgcgcgcaccagaccaccttctgcacgttgatggaggagagtcggccccagatacgcaacatttcggctccagtggtgatgcgcgtccgggcttcaggccgcgcgcggttgcctggcggcggccgcggcgatggcttcgcggaacagctcgccaaggatggccacgccctgctcgatgcgctctgccgacaccgtgacgaaggccaggcgcagcgcgttgcgcttcgggttgctggcgtagaacggcgcgcccggcacataggccacgttgcgcttcacggcttcttccaggatcaccatgctgtccaggccctcgggcagctccatccagatgaacatgccgccttcgggctcgttccaggtcacgccctcgggcatatggcgcttgagcgcatccagcatgtactggcactgcttgccgtagagctcgcggatggtcgggatatgcgtgtcgagcaggccgtcgcggatggtctcgtaggccacgcgctgggtgaaggtcggcgtgtgcaggtcagacgcctgcttggcctggcacagcttgaagtgcagctcgggcggggcgatcacgtagcccaggcgcatgccgggggccaggatcttcgagaacgagcccatgtagatcacgccgtccggattcatcgacagcaggctgggcagctggtcgccggtgtagctgagcgcgccgtagggatcgtcctcgaccagcagcacgccctgttccttggcgcgggccaccagcgcctcgcggcgttccagcggcaggcggcgcccggtcgggttctggaagttgggcagggcgtacaggaagcgcgcgccggcggtcagctcgggcgtcagcgcctcgggcagcaggcccttgtcatcgctggggatcgagacgaactcaggttcgaacagcgagaacgcctgcagcgcgccgaggtagctgggggtttccaccagcaccttgctgcccgggtcgatcatcaccttggcgatcaggtccagtgcctgctgcgagccggtggtgatcagcacgcgctcgaccggcgcgtcatggcgcctggcgacgaactcgcgcagcggcaggtagccttcggtcgcggcgtattgcagcgccgcctgcgggttgtcggcgaatacgcgggccgtcgctgcctccatggccgctaccgggaacgaggccggcgacggcaggccgccggcgaacgaaatgacttccggacgctcggtgaccttcaggatttcgcggatggccgagctggtcagttgctgtgcccggcgggagatggcccatttcatgatgtgtctcttgtggtctgggggagttctgggctgagcggcaagcctgccgctcagtcaacgataaatagtcgtgcgcccttcggcgaggacgaacggtgcgcttccgcctggtcggctacctggtagctggtgcccgcgccgagcacgaactgccggccgtcttccagctcggtatggagctcgccgtccagcacgaacaggatatggcccttgctgcaccagtggtcggccaggtagcccggcgaatattcgaccatgcgcacgcggatgtcgccgaactggcgcgtgcgccaggtggcctcgccctgctcgccggggtggcgggtcggcgcgatggccgaccagtcggtggtgccgaagggcaggttgtcgatgcgcatgcgggcctcaggccgccttcacttcggcgatcatctcgatctcgacacaggcgcccagcgggacctgcgccacgccgaaggcgctgcgcgcatgcttgcccttgtcgccgaacacttcggccagcagctccgacgcgccgttggtgaccaggtgctgctcggtgaattcgggagtcgagttgaccaggctcatcaccttgacgatgcgggtgacgcggttcaggtcgcccacatgcgcgtgcagcgtggccagcaggtcgatggcgatcgcgcgcgctgcggccttgccggactcggtatcgatgtccttgcccagcttgccggtccataccttgccgtccttgcgggcgatatggcccgacaggaacacggtgttgccggtttgcgcggccattacataggcggcggcgggggcgttgacggccggcagttcgatgccgaggcgggcaagggtgtcgtagacggacatgtaggctccagtcagtgaatgcgtccagggaggatcggtggcgtttccggggcgggggcgggtgcgctttgctgcacggcggcgcggcggccgagggccacgacggcgatcaccgccaccgcgaaggcgatggtgggggcgtcaagcggctcggccaggatcagcgcaccgcccgccagcgtcaggaacggctgcagcaattgtatctggccgacgcgcgccacgccgccttttgcgaggccggcgtaccagaaaaggaagccgacaaacatcgagaacaccgacacataggccatgccgccccaggcgcgcggcgacgccgcggctattgccggcaggtcgcgcagggtcagccaggccaccaccggcaccagcaccggcagcgacaccaccagcgcccagctgatggtttccagcccgccctgctcgcgcgacagcttgccgccctcggcatagcccagcgcgcccagcaccacggcggcgaacaggtaccagtccgcatgctgcaggccgccggcaccctgccagacggcaaagcccaccaccagcgcgctgccggccacggccgacagccagaacgccggcgacggccgctcacgcccgagccaggcggcgaataccgcggtcgccagcggcagcaggccgatcacgatggcgccgtggctggccggcacctcgcgcatcgccagcgaagaaaacagcgggaaacccgccaccacgcccagcgcggtcacggccagccgcggccactggccgccgcgcgggcggcggctggcggacagcgcgccgcgccaggcaagcagcgccagcgccagcagcgcggccagcacggcgcgcgccagtgccacaaagaccgggtccagctcggccaccgccatgcgcgtgaacggcagcgtctggctgaagatcgccacgccgacaaagccgagcagcatgccgccggaggccggtggggcagacgtcagtggcggagaagcggggcggctggcgggcatggtcggggtcttggttgtcatcggctcggaatcggatcgccgcgggtcacggcacgcccgggctggcgctgaccgcaatccacagcgcggtcagcgccagcgccgcgcccatggcgcggttgaaccagctcacgcgctggccttgctgcagccattgccgcaacgacgcgcccagcacgccgtacacgccgttgctgacaaagcccagcacggcgaacaagccgctcaccagcagcacgcgctgcagcggcgagggcgcgcccgtcatgtaagaggccgcgactgccagcgccagcatccacgccttgatgttggcgtactgcagcaccgccgactgccacacgctgagcgggcgcagcacctgcttctgcgccagcaccgtgctgcgcgcgatcttccacgccagccacagcaggtaggccacgccggccaggtgcacgctggcggccagcgcgggctggcccaggatcagcgcgcccacgcccagtgcgcacagcgccaggatgctggcaaagccgaaggccacgcccacgcagtgcggcagcgtggcgcgcagcccgaagttggcgccggtgaccgcggcgatggtggtgttgggcccgggcgtgaacaggcccaccgtcagcagggtcagcagggccaggaactgcgcggccgtcaggccggtgagcaagccggacgccatcacgcgaacgcgaccaccacgcgccggttggtgcggctcttcttctcgatcctggtcaccaccactgcgccgatctcgctggtgttggccacgtgcgtgccgccgcagggctggcggtccaccccggggatttcgatgatgcggatgctggccgtgcccgccggcggcgcggcgccgatggtgcgcaccagctcgggctgggcggccagttcctgcggcgtgatcagcgtggtgcgcacggcggtgtcggcgtggatcagcgcgttcaggcgttcggtcaggtcggccttgtccagggtcgattccggcaggtcgaagtcgacgcgcgccgactccggcgagatgccgcagccggtcaccggcaccgggatcagcgagcccagcaggtgcaggcaggtatgcagccgcatcagcttgtggcgtcgcgcccagtcgatggtcacggtgacgcgctcgcccacgcgcggcagcggcgcatccggtgcgggcacatgcaggatgcggctgcggtcttcggcgtagatggtgtcggcgatggccaccgtgcgcccgtcggccagcgccagcgtggcggtgtcgccggcctggccgccgctgcgcgcgtagcacacggtttcgtcgagttcgatcccttcggcgccggccgccaccacggtggcggtgcagtggtcgaggtaggggtcttcgtcgaagcgcttgcgggtggcggacatcgggggtctcctggtgggcttgttccgggtgtggctagcgcagggtgcggatgccctgcgcggtttcgatttcggcgctcagttcaggcgggccgtcggcctgctcgatggcgatgaggtggtcggcgcccagccaggccagcccctggcgcagcagttcggcgcgcgggtggcgcccggacagcctgcgcagcgccaggccctgccgcggcaggctggcgccggggtagctggccacgtcccactggatcaggctgggcagcaggccgtcgccggcgctgtcggcttcgcccggccaggccggcaggctgccatcctcgggcacggtgatgcgccagtgcaggccgccgcgggtcatcgggatgaccggggcgatgcgctccgggtactgcgcctgccaccggcccaggtcggcggggcgttccacgcgcgcagcccagtgcagcaggaaggggccgtcgcgcaggcgctgctgcacggcctcggtgtccaggccgaaccagcgcgcccgggccggcgctgttgccgtcggatcgaccgcgatcacttccaggtagacgccgccgaacatgcccagcacacggttgtgcgtgcccatggccgtgtgcgcaccgccgccctggggcgcaatgcccagcaggccggcaacatggtccgtgccggcgtccagatcgggcgcggcgatgacaaggtgatcgagggcgagcttcatcttggcttgatggtagacaaggtagtcggtacagtaccggtacagttgagcggatcgtattcagtacagttgcaggagcagcacatggatgccaacagcagggatggcgacgccggcggcgagaccgccaccgtcacccgtcagaaggatagcggaggcgacgcccacagcacatcggggcatacctccggccgcgcgctgcggctggtggtgccgcccaccgagcgcttcccggatccgatcccctcggcgcagatgacgctggtcgagcaactgaccgaatgggcccgcatgcgcatcgacgagcgcgtgttccgctccggcatgcgcatgccgtcgatccggcagctggcccaggagaagggcatctcgcgctttaccgtggtcgaggcctatgagcggctggtggcgctgggctacctggaatcgcgccgcggctccggcttctacgtgcgcgagcgtgccccggccgcgcccgcggcgccggtgtccggcgccgtggcggtggcgcgtaatatcgacgtgacctggctgctgcgcagcatgttccataccgccgaggcgcacaaggcgcccggactgggcttcctgcccaatgactggctcgacggcgaactgatcgccagcgcgctgcgcgggctgggccgccagcccggcaaccattttctggccagcggcacgccgcagggcttcctgccgctgcgccagcagttgcgcacccggctggaagaactggagatcggtgccagcgccgagcagatcgtgctgacctcgggcatcacccaggccctggacctgatcgcgcggctctacctgcagcccggcgacacggtgctggtgggcgacccggcctggttcgtgatgttcggccgctttgccgcgcagggcgcccaggtgatcggggtgccgtacaccgccgaagggccggacctggaggcgctggagcgcatcgtgcaggcgcggcggcccaagctgttcgtgatcaactcggtgctgcacaaccccaccggcacctcgctgtcggcggccaaggccttccagctgctgcgcctggccgagcagtacgacttcctgatcgtcgaggacgatatctactgcgacctgtgcccgcccggccacgccgccacccggctggccagcctggaccagctgcgccgggtgatctacctgggcagcttttccaagacgctggcggccaacctgcgcgtgggctttatcgccgcgcacccggagacggcgtcggcgctgaccgacagcaagctgctggcggggctggccacgccggagatcaacgaacgcgtgctgtacaaggtgctgaccgagggccactaccgcaaacatgtggagcgcgtgcgcacccggctggaccgcgcccgcgacgagacccggcgcgagctggagcgcctgggcctgcggctctttcccggccagcacgccggcatgtacctgtgggccgataccggccgcgacaccaacgcgatcgccaccgcggggcatgaagagggctacctgttcgccccgggcagcctgttctcgccgtcgcagatgccgtcgggctggatgcgcttcaacgttgccagcagcggccacccggaaatgctggccttcctggcgcgccagctagaacgcctgtaagtcacatcccggcagcacccgggccttgaaaaatggcccgggcggccctatgtctggcggcaccggccacaggaccgtggccacaccgactttccagattcgcctgtttccaagaggagaaccatgaccgcaccgcacgagacgatgagcttccaggcggaagtgaagcaactgctgcacctgatgatccactcgctgtacagcaacaaggaaatcttcctgcgcgagctggtctcgaatgcttcggacgccaccgacaagctgcgcttcgaggcgatcgcgaacccgtccctgctggagaacgacgccgacctggcgatccgcatcgaggccgacgccaaggcgcgcacgctgacgatcaccgacaacggcatcggcatgagccgcgacgaggcgatccacaacctcggcaccatcgcccgctcgggcaccaaggaattcttccagcagctttccggcgaccagcagaaggacgccgcgctgatcggccagttcggggtgggcttctactcggcctttatcgtcgccgacaaggtcacggtggaaacgcgccgcgccggcctgggcgccgaagacgcggtgcgctgggaaagcaccggcgacggcgagttcaccatcgatgccatcgcccgcaacgagcgcggcaccaccatcacgctgcacctgcgcgagggcgaggacgacttcctctcggcctggcgcctgaagggcatcatccagaagtactcggaccatatctcgctgccgatccgcatgcccaaggaggtgtgggacgctgaatccagcacctaccagcgcaccgccgagtgggaaagcgtgaaccaggccagcgcgctgtggacccgcgccaagtccgacatcaccgacgagcagtacaccgccttctaccagcacatcgcgcacgacaacgaggcgccgctggcctggacccacaaccgcgtggaaggccgcagcgaatacacccagctgctgtatatcccggcgcgcgccccgttcgacctgtgggaccgcaaccacaaggccggcctgaagctgtacgtcaagcgcgtcttcatcatggacgatgccgaccagctgctgccgggctacctgcgctgggtcaagggcgtggtcgattccgccgacctgccgctgaacgtatcgcgcgaactgctgcaggaaagccgcgacgtcaaggccatccgcgagggctgcaccaagcgcgtgctgtcgatgctggaaacgctggccgacagtgaagaagaagccgagcgcgccaagtacaccaccttctggcagcagttcggccaggcgctcaaggaaggcatcggtgaagaccaggccaatctggagcgcgtggcgaagctgctgcgctttgcctccacccacaacgacaccgccgagcagaacgtggcgctggccgcctacgtcggccgcatgaaggaaggccaggacaagatctactacgtcaccgccgatacctggtccgccgcgaagaacagcccgcacctggaagtgttccgcaagaagggcatcgaagtgctgctgctgaccgaccgcgtcgatgaatggatgctttcattcctgcgcgagttcgacggcaaggaactggtgtcggtcgcgcgcggcgacctggacctgggcaagctcgccgacgaagccgagaaggccgagcaggaaaaggccgaggccgactggaaggacgtggtcgatcgcgccaagaccgtgctcgacggcaaggccaaggacgtgcgcgtgacgctgcgcctgaccgcgtcggcctcgtgcctggtctctgacgaaggcgacatgagcggctatctgcagcgcctgctcaagcaggccggccagaaggcgccggacgcccagccgatcctggaactgaacccggaacacgcgctggtgcagaaactgcgcgatctccccgagggcgatgccttcagcgaccgcgtgcaggtgctgttcgaccaggcgctgctggccgaaggcggcatgctggacgatccggctgcgtatgtgcagcgtgtcaacaagctgctggcctgacgccccggctgcccccgccgcgcaggcggcgggggattcccatctcaatgtgttgtagcggagcgcgtgaccgatgacactgaagcggtgcttcccgcctgtcgttgacgccggcacgcgcatccttattctcggcagcctgccgggcgaggcgtcactggcgcaatgccagtattacgcgcatcggcagaatcagttctggcgcctgaccggcgaagttctcggtgaagacctggtccgcatggaatatgccgcgcggctgcaaacgcttctggcgcatcacgtcggtctgtgggacgtggtggcgcaagcgaagcgtgagggcagcctggacagcaatatccgggatcacgccggcaacgacctggcgagcctgatcgaatcactacccaggctggctgtcatcgccttcaatggcggcactgccgcgcgtatcggtttgaaggcccttgggcagcatggcgaccatcaccggatcatcaggcttccttccagtagtcccgctcataccttgccctacacggaaaagctgggcgcctggcaggcattgcgagagtggctgcctgtaaggcagcgtctggcatagctcgttcacgcacccacgttacctgggcatcccttcatacatgccggtgacgtcatccattacctgaagaatacgctcgctggtcgtggcgatgttcctcaactgttccgcgcgactgaccccggtctggttgagtgcctcttcaaagaacagccactgagacccggccagcagcagttcgcgacggattgcctcggtgttttgcggcgccgaggtgagaagctcctgcgcggctgcgaattccctggtagccatgtccagatcctgcgccatccggggggaggtaatgccccaggcgcggaacatgctgatcttggcgattctctgcgagagcatccgctggcggccggcaacgttgatcagcttgcccgtcgcggtgcccgaatgtttctcgagcaggagggtcgcctgttgcgcaagcttcagcacgtcctcgctcattcttgcgatggttttcgcgctatcgggattcggatcgccgccggacagcaactgtctatagggaatccatgtctgctcgagcctggcgtaggaatccttgatctccggcgtgggtgcgaacgccgtcagctccatgagctgcttgtcgaagagcgccacggactgctcgagaatcttcttcgaacgttcgacttcaacgccgaggccagcctggcagtaagccttggccatgcgctgagacagcatgcgctggcggcccgccttgttgatcgccgcgttgatcgtcagcgtttcggcgcaagcggtcccggccagcgccaggacgctgcagacaatcaggcagaaggagctgaggtaacgtttcaagggcgtctccgcgtcaggctctggttggtcctttgggcccgtcgttcgagccgacgacgtggcggatcagctgatccatttccttgatgatgtccgcaagcacctgcgtgatcaccgagaactccctgccgtactctcccgcccgcgccgccgagatgcgtgcattcattgcgacgatgttggcctgcatcgaaataccgctgaggcgatcggcgaggtcggtctggcgtttgcgcacagcgagctcgcaacggtgcatttcctcctggtaggcctgcgtgacagtctgcagcagctcaagtatcggcgtggcctgcgtcacaagcacatcgaggaatgacgcttgccggctggtgtcggccagtggtgtgtctatcgctgttctgacccgggcgatgaattcacggatgcgagcgtcagcgcgcgcactgccaaagtacagttgctgcaaggcgccggagaatgtgccggggaagcgctcactgcccgtcacgagatccgaatgcgccgactcgaacattgacaggcacttgcgtgcgatatcgagcgcggcagtgtccccccgcgaagcgagcagcatctggaggacgatccgttgcgacagcatgcgctgcctgccggaaaggttgatcaatgcgccgatggtctcggcggacacttcggtctcgggtgactgagtggagagagcgttcatgccatgccttgcaggtagtgtcgacgcagacgcgcaccgcgctgaccggcgaagcaaaagcgccccgaagcgagatgcctgcgaaccggttgtccggttcgtggtccattcgcttcggggcgtcgttgcccgggatgctccttttcggagcatgtcatcgcgacttgccagcttgtttcaaggccgccgttggcctgtgcgaccgcttcgcaatatccatgccatggctcacggaagttgcatcagcttctttcggcgacacctgcctcgtgctgctgcgacgcatccacggacgcggtgctgaagtccaccggacccacgcgcgtgcgcaggttcagggtgatctcgccgtgcgcgcgcgtaaatgcgggcaggcgcgggatcagccagtagctgcccagcgacgcacctaccgagagcgacagggcgccacctctgcccttgagggccatcacgttcatggtggcccgctccagctgccgcagcagcggtgcaatttcagccaggtattcgcgcccgcatcggtgagcgccatggcgtcgcgccgcccggtgccaggacatggctgcggatccgatcatcacggcatgatttcctgacagtgcctcgccacgtcctgcacgccggcatcgcctcggcggtgccctatgtggtggcctttgcctgcctgctcgtggtgggctggctgctcgacaaggtcgggcagggccgcgagcgcgtgttcatggcggtcggcgccaccgtcatggctgtcttcatcgcgctgatggcctatgccgggcctgacgcggcccgcagccagccaacggcttcgcaaatcgcccgtactgaatccacccgtgagcatgtgacgcatgccggattgccgtgggccatggcgcacctatactggagtcgagcgacgaatcattcgaaaccgggggtatcgatcgctccttgtagtgcgccttgcgggcttgcactttcggacgcatggcgatgacgcatcggaagtgagcgccttagccggcaaccatgctggcaaggaggcaatcatgttcaagcatctcctgctggcggtcgatggttccgacctgtctgaatcggcgttccgcaaggctctcacgctggcgcgggacatgggggcgagtgccaccgcggtgcgcgtctgtccgaactaccacgtcctgacctaccaggtcgagatgctggaggacacgcgcgaaacctacgtgaaggaggcctgggaaaacgcgacccgctacctgcgcggactggccgatgaggccgtcgccgcgggcgtggcctgtgacacggcatacgtcgtcaacgaccatccctacgaggctatcatcaagacggccgaggaaaaaggctgcgacctgatcgtgatggcttcgcacgggcggcgcggggtccagggcatgctgatcggcagcgaaaccctgaaggtgctgacccacagcaagatcccggtgctggtgtaccgctaggcggcgcctagcgccgccggcgcggcgcgcccgcctgcacgcattgccgcatccgcgccgccaggcgcggcagtgagcctgtgcgccagcggctgcgcaggtcgtcgctcagcggcactgcgatcagcgccagcagcagcgcggccagcggcagcgtggcgctgaaacccatgtgcttgaagcccagcgcgccggcgatgccgccggcaaagaacagcgtgaccagcaccaccagcaggcgcagcttgcgccggttggcgagcacgcggggcagtgggcgcgcttgtgtgcgtgatggcgtgcgcgccggcgcggctgcgttccagtagcacagcttgcccagctcgatgccgatatcggtgaccatgccagtgaggtgtgtggtgcggatctcggcgttcgaaagcttggtgatcatggcattctgcagccccatgatgaagcacagcagcatcaccgtggctggcacgaacagccactggtgctgccccaggttgccgccgatcaggccaaagcacagcagcagccccgcctccagcgccagcggcagcgcgtattcactgtgcagccgttcgcgtcgtccccagttgaccagcaccgccgagcacgcggcgccgccgagaaacgacagcagcgccccgaccccatccagcaccagcgcgaagctgcccagcgccaggttgtcggccatggccgagaccacgccggacatatgcgaggtgtattgctgcacggcctggaagccgccggcattgatggcgccggcgacaaagcagaggtagccggccaggtgccggttggcgtgggggctacgccgcttcccggtcagtttgcgcaggtacaggatcggcatggcgatggggcggcgtctggcggattgggaagggcggcggcggacctgcgttgccgctacagggtgtcccggggccgggcaagggcgtgccaggcgtcggggtcggcggcaaccgcctcgccgcgcttcatgcggcgggcagtcggtgtcagcttcaatgcatgcacggcttccagcgcccgtgcgcgtgccagcagcgtctgcagcgacggcagccggggcgggcctttccaggcaaacaaggtgtagttgcagctgtcctcggcgcgtgcgaccgacatcgaggccccgaacacggcgcgcaccgcgcccaggtagtgcggcatgccgcggtcgcttgcaaggaagttggccaccagcatgccgtcgtcggccagccgcgcgtggcaggcagcgtagaagccggcggagccaagctgcagcggcatgccgtcagccaggaagccgtcgacgaggatgacctcggggcgcgcttcccggcccctgacgtactcggcgccatcggcgcagaccacctgcaggcggacatcgtcgggcggaatgcggaagcgctcgcgcagtgcgatcaccgccgggtcgatctcgacagcgaccacccgcgtggcgggcaggtgccggtagcaatacttgaccagcgagcctccgccgagtccgatcaccgaaatccgtgccggcgacggatgcaacagcaggaatcccatcatggtgcgcgtgtagcccagcaccagccggtcgggatcgcgccgcgacatgaagctctgcgtggccagcacgtcgaagtgcagcgacagggcggtctcggtctccagcaccacgggcgtgccgtcgcgcggggcttcggccaggaagcgcatataggactcaaaggatgtgcggcggctacccgctgcgacgccggggtcggcgtccggtttgcgttcgttcatgacggcagccttgcgcaatgcaggatccggggaccagccggctggctggggcgggcaaggcggcgggtggctcgcccgggtatcgcggacatcggggacatctgtttcagtcacatataatattaatcgtattatcatatcccagcacccgcgcggtggctgcatccggccgggaaatgccatgcccggtcccgcggttgtggtgaaaccgccctttgcgggctgtgccagcccgcctgcccatcccggaaactggatttgcggcgtgcgcttctggcatcctgacggtctgtcctgacgtccggcctgcccggaacactgccatgccactttccgactggacccacgaagccgtccgcaagatcgatgcggatttcaaccgctccgccgacacccacctgatcccgctggacctgccgggctacccggacatccgcgtctatttcaaggacgagtccagccacccgaccggcagcctcaagcaccggctggcgcggtcgctgttcctgtatgcgctgtgcaacggctggctgcacgagggcagcacggtggtggaggcatccagcggctcgaccgcgatctccgaggcttactttgcgcggctgctcgggctgccgttcgtggcggtgatcccggcggggacctcgcgcgccaagatcgaggcgatcgagttctacggcgggcactgccacctggtgggcagcccgtccgggatctacgccgcctcgcgccgcattgcgcaggagacgggcgggcatttcatggaccagttcacctacgccgagcgcgccaccgactggcgcgccaacaacaatatcgccgagtcgatcttcaagcagatggcgcacgaagagcatgcggtgccggcctggctggtatcgagcggcggcaccggcggcaccatcgccacgctggggcgctatgtggcctatcggcgccacaagacccgcgtgctgtgcgcggacccggagaactcggtgttctttgactacttccgcagctgcctggacggcaagccgcagccggacctgtccctggcggagggctagcgcattgaaggcatcggccggccgcgcgtggagcattcgtttatcccgacctgtatcgacgccatgcttaaggtgccggacgcgctctcgttcgcggccatgcgctacctcgccgggcgcttcgggcgccgcgtgggcgggtccaccggcaccaatttcgtcggcgtgctgtacctggcccagcagatgcgcgcggcgggggagggcggcgccatcgtcagcctgctgtgcgacagcggcgagcgctacggcaacacctattacgacgatgcctggtacagcgcgcagggcattgccatcgaggcggccgatgcgctggtggcgcgcgcggtcaatggcgaggccgtgctgacgccgcaggcggtggcggggctgcggtcggccggcgccggcatcccggcgggcggctgaaacccgtggccccgcctttctgtcacaatgccggcggctggcgcgccggccattgatttcaaggtgaattccctatgcgtatcttcggcatcagcatccatatcatcgttgcactgttctttgcggtgcacgcggtgcgcacacaccagaacatgtactggctgctgatcctgttcctgttcccggggctgggcagcgtggtgtatttcttcgcgatctacctgcccgagctgcgccagtcgcgcggcgcgcgtgcggccacgcgtgccatcacgcaactggtcgatccgaaccgcgcggtgcgcgaggcccgctcagactttgaccgcgccccgacggtggcgcaccgcatgcgcctgggcgccgcgctgctggcggccggggagccgtcggaagccctgcagcactaccaggcagcggccagcggaccgtttgcgaccgatccggcgctgctacaaggactggcacaggcgcagttcgccaccggcgatgcggccggcgcgctggcaacgctggaaaagctgttcgccaccaatccgcagtcgcgccagcagcccgatccggccttgctgtatgcgcgcgcgctggcggccaccggcgcatccggcacgcgcgccgcgttcgagcaggcgctgaccagcgccagcgatgccgcgccgcgctgccttttcgccgactggctggcggcgcagcccgacgccgccgaccgcgaacgcgcgcagcagctctatgccgatatcgtccacgacgcccgccactggccgcgccacacccgcgaacacaaccgcgaatggctgcagcgcgcgcaggcggcgctgggcaagtaatccgcgtttcccccatccatgctggaacgggtgctgaacgcctttctcgacaacatgaccctactgaaacgcaaatcgattgaagccgtggcctcgcgccgtccggcacgtggcacccgcacccgtggcgaggcgccggcacgcgaagaaaaacgcatgacgccgcgctttgcgccggtgacgttctcggaaatggaaggagtgcgctacctgcacttcggcaccgagtgggtgcagggcgcgatgcgcctgcgcaagcccgatgcgatcgagctggaatacgcgcagcagatgatggcctggctgctgttcctgtcgccctcggtcgaagaattccacgtggtgcaactgggcctgggcgcagcggcgctgaccaagttctgccaccgccagttcagccgcgcgcgcgtgaccgcggtggagctgaaccccgcggtgatcatcgccgggcgcagcatgttcggcctgcgcgaggacgacgcgcgcctgaccgtgcgcgagcaggatgcctgggactacgtgatggacggcacccacgccggcgccatcgacgtgctgcaggtggacctgtacgacgccaccgcgcgcggcccggtgctggacaccaccgcgttctaccgcgcctgccgccgcacgctgaaggcacccggggtgatgaccatcaacctgttcggcgaccacgacagctttccgaagaatatcgaacgcatctgcgatgccttcgacaaccgcgtgctggtgttcccggaagtgcatgacggcaacgtcattgcgctggcattcaatgggccggagatcgatgtgtcgtgggaagtgatcgaggcgcgcgccgatgtggtcgagaagactaccggcctgcctgcgcgcgactgggtgcagaagctgcgcgcggcgaatgcgcggcaggaagagcggttgaagatctgaggaacggccgctctcccgctgcgcgggagagcggcagcaggcagtcccgccctcactccttgtggaagaactgcgccagcgaccactcgtcggtgcgcgcctcgtacttcagtcccttcttcattgcccacatcgccagctggctgtgcgacggaatgatcgcgtggtcggccagcgcaaacttggccgcgatgcgggcattctcctcacgcgccttgtcgctgctgacggtagtcagcgatttctcgatcagctggtccagctgctggttgctgtacttgccccagttccaggtgccgtaaccggtcttggggttgggcgtgccagtgatcgagcgcaaggccacgttggccgcggccgagccccagcccagcatctggaaggcgaactcgccctggcgtgcgcgcgtgaagtaggccgccaccggcaacgtctccaccttggtctggatgccgatgcgcgtcagcatgctggcggtggcctgcgccactgcggcgtcgttcaggtagcggttgttggtggcgtgcagcgtcaggccgaagccgtcggggtagcccgcgtcggccagcagtttcttcgcgccttccggatcataggcctccggcttggtgcccggatgcccgaagatctgcggcgacacgatcgacgatgccggcaccgccagcccttccatgatgcggctgatgatggcgtcgcggttcagcgacttgctgattgcggcgcgcacgcgcgcatccttgaacgggttcttgcccagcggcttgccggccttgtcggtgacgaagggcgggttgtcgcgcgactggtccatctgccagaagatggtgcgccacgacacctgctgctcgatcttgaacttcggattctgcttcagcttcgcgacgtcggccgacggtacgctctcgatcacgtcgacatcgcccgccagcagcgcggacgaacgcgcgccgttgtcggtgatgatgcggaagatggcgcggtcccactcgggcttggggccccagtagttggggttgcgctccatcacgatttcctgcccgcgcgcaaagcgcacgaacttgaacgggccggtgccgatcatcgccttgcccgagtcgaagtccgcctgcgtcagcgtggcggcgaccttcttcggcatgatcggcacgctgttcaggtcgttggccaggttggcgtaattgggcacgctcatggtcaggcgcaccgtcagcgggtcgggcgtgtcgatgcgcgcgatcggcttggtgtagctggtgaacgagccggggctgttgaccagcttctccgggcgctccagcgaggccttgacatcctcgctggtaaagggcgagccgtcatgccacttcacgttggggcgcagcttgatctcccaggtgatggcgttgaccggcttccacgacaacgccaggccggggatgtagcgcgcgttcttgtccatgaacacgagcgactcgaacacatgcagcgcgatggcgttgttggggcccgagttgttccagtgcgggtccatcgaggtcacgtcggccgccaggccgatgcgcaggtcttcggcgtgggcggcacccgccggcagcagcgtgaaggcggcactgccaagcaccagcgcggtggcggcatggagcacggcgcgacgggcagggcggcggggcggacgttgcggcggcagggcgtgggtcggtgtcatctggctggctcctcgtacgggtccgcgcgggcgcggccgggtcctcaggcgggtttgtcccgcattgtgccgctaaagtggcttggttgcagcctttggcgcgggcaggcaagccgatgcgggacggcgccgttagaatggcgcccatgtttgccaattcccgcaccattgtctcggcccaggccgatgtccacgaacacctggccgcgcgcgtcgcgcgccacctggccgagccgttccgcaagcccatcggcgaagccagccggcgcgagctcggcgcggcgctgcaaagctggcagcaggccggcggtgcgccgctgatcctggatgcgggctgcggcgtgggcgaaagcacgctgcggctggccacagcgttcccggaccacttcgtgatcggcatcgaccagtccgagaagcgcctggccgccggcaaggactggtggggcgaggcgccgatgccagccaacttctgctgggcgcgggccgacctggtcgatgtgtggcgcctgctgcaggccgaggccgtgccggtggcgcgccactacgtgctgtacccgaacccgtggcccaagatcggccacctggggcggcgctggcaggggcatgcggtgttcccggcgctggccgcctgcggcgactatctggagtgccgcagcaactggcgcatctatatcgatgagtttgcccaggcgctagcactggtcgggcgcccggcgcgggtagaggcgtgggccccggcgcaaccgatgacgccgttcgagcgcaagtacggggcatcgggccacggcttgtggcgctgcgtcagcgagcgccagcgcgcctgagcggctcgccaatgaaaacggcccgcgcatgcgggccgtctttttgccaggcgcagccgggcgcgtcagtggaacagcggctgctgcgtcggggcgtcctcgggcagttcggcatgcacgatctcgccgttgcggtccgcgtacagcggcgtgccgcagtcctcgcagtattccggatcgaacagcgcggcgtggcggaagatgtcttctacgccggcgttgcgcagttcctcgcagatctgctcgagcgggttgcccttttcgtcggcatcgacctcgccggcttcgcggccgtagaccggccacacgatgccgtagatcacatccttctcgccgcgcatggtgaagcccacgcggtattcctcgaccacttcctcgccgaaggcagccaccacggcggccagctggccggcggagatgtcgagcgtgccgcacaggtagttgaccgcggcgcgcacggtcagcgggcggatgctcttgtcggactcgcggcaggacaggaagaatgcgtcgggcagcagcagctcgaactcgcagcccggcagcagcagcgccaccgacggctgcacctgggtgcgccactggtcgaggcaggtcgagcgctcggcgtggtgctccttggcgtcttcctgccagcggaacagcgcctgctcgtgcggagccaccaccacggccagcaggtagcgcggatcggccaggatcggcgcggtctcgggcaggtcgcgcaagtcgaccttgggtaccgtgccggccagggcggccgcggacagcttgtgcgtcagcgcaaaggtgtcgctgtgcgtgcgcggcagctggtcgatgctgtataggtagggcgacagcgagaccttggtcccggtggccagcacatgtgcctgcaagtgcaccgccaacgtttgcgccagctccggcttgagcgagccggagggaatggcgtagcgcgtgtgcgccaggatcggggcggcgatcagcagcgcgtcatggcgctggccgtcgacctcaatggtggcggattcggcgagcgtctcggcctgctcggccagcacgtcggaggcgtctgcattgtgcttgaacaggtgttccagcgccgcgtcgagcgcggtctggctcccgttcttcagcaggcggcccaggcgctgcgagagccgccgttcccagtacgcgtcctccatgcggctgcccgaagcgtcgagggcgagcgcatcggccaccagacgctcggcgtcaggggagagtcgtggggaagccttggggcgaaaacctgccatagaaagaaaccgtccgtttatgcgtaaaacggtattctactcgttgcgttgacacgcaggccgctatatgcgtgcagcgtgtgcggacgcgcccgggcgtgtggctttatttctgggccggagcggaggcggcaggggccgcgggcgcgtggctttcgacgctgtgcgactcgccggacatggaaacgtcgctgccgcccttggtcagcaggtagagggccgcgccggcaaccacgacgaatgcgataaggatcttaaccatggtgtctcctgattctggatgatgccgggcggacccggcttccggtcgtgcgaccgctgttcttgtgcaacacagtgtggcagcactggcttgcgtggaacttacacgcgcccggcttcgttcggggtgatgcaaggggcgcaggacctcaatgaaaaacgccgcctgcccgggccccgcaacggggcccgggcaggcggcgtcagccttggcaggctgcgggcgcctcaggtggatctcaggcggccagcagctggcgcagcacgaacggcaggatgccgccgtggttgtagtagtcgacctcgatcggcgtatcgatgcgcaacagcaccggcacgcgctgcacgtcgccattggcgcgatggatcaccagcaccacgtcctgctgcggcttcaggtcgccctcgatgccttcgatatcgaaggtctcgttgccggtgatgcccagcgtctgcgcactgtcgttgcccttgaactgcagcggcagcacgcccatgccgaccaggttggagcggtggatgcgctcgaagctgcgtgccaccacggccttcacgcccagcagctgcgtgcccttggcggcccagtcgcgcgacgagccggtgccgtactcttcgccgccgaacaccaccgtgggcgtgccctcggccacgtacttcatggcggcatcgtagatcgacatttcgtcaccggtgggctggtgcagcgtgatgccgccttccacgcgcgagccgtcggccttgggcgggatcatcaggttcttgatgcgcacgttggcgaaggtgccgcgcatcatgacttcatggttgccgcggcgcgaaccgtagctgttgaagtcggccttcagcacgccgtgcgacagcaggtacttgcccgcgggcgaggtgtccttgatcgatccggccggtgagatgtggtcggtcgtcaccgaatcgccgaagatgcccagcgcacgcgcgccgcgcacgctggcgctggtggcggcgggctgcatgctgaagtcctggaagaagggcggctcggcgatgtacgtcgacttgggccagtcgtagacctggcccttggtgcccttgatgccggcccacagcttgctcggcttcttgacctgttcgtagttgcccttgaaggtcttggcatccatcgcgtacttcatcagtgcgtggatttcttccgaggtcggccagatatcgcccaggtagatgtcgcggcccttcttgcccttgcccacgggctcggtcatcaggtcgcgcgtgacattgccggcgatggcgtaggccaccaccagcggcggcgaggccaggaagttggcacggatgttcgggtggatgcgggcctcgaaattgcggttgcccgacagcacggcagcggccacgaggtcgttcctggtgatggcctcgttcagctcgggcgtcaggtcgccggcgttgccgatgcaggtggtgcagccataggcggtcacgccgaagcccagcttttccaggtacggcagcaggccggcggccgtcaggtattcagtcaccacgcggctgcccggggccagcgaggtcttgatgtgcggcgccaccgtcaggccggcttccaccgccttcttggccagcaggccggcgcccagcagcacgctcgggttggaggtgttggtgcaggacgtgatcgcggcgatcagcacgtcgccgttcttcacctcgaggccgtcggtggtggtgtaggcgcggtccaggtcggccgcctccttgttgaagccgttctcggccaccggcttgctgaacagcgaggcgaaggtgctcttgacgttgccgatctcgatgcggtcctgcggacgcttcgggcccgccagcgacggcgccaccgtgcccaggtccagcgtcaccaccttgctgtagtcgatctcgccggccctgggaatgccgaacatcttctgtgcgcggaaatagccctcgaacgcggcgatttcctcttcggtgcggccggtgcccttgaagtagtcgatggtcttctcgtccaccgggaagaagcccatggtggcgccgtattccggcgccatgttgccgatggtggcgcggtcgggcagggccaggctggcggtgccttcgccgaagaactcgacgaacttgccgacgaccttctccttgcgcagcatctcggtgatggtcagcaccaggtcggtggcggtgacgccttcgcgcaggcggcccttcagctccacgccaaccacgtccggcgtcaggaaatagaccggctggcccagcatgccggcctcggcctcgatgccgccgacgccccagcccaccacgccgatgccgttgatcatggtggtgtgcgagtcagtgccgaccagggtgtccgggtagtagacgccgtctttcttgtgcacgccgcgggccaggtattccaggttgacctggtgcacgatgccgaagcccggctgcaccacgccgaaggtatcgaacgcctgcatgccccacttcatgaactggtagcgctcgttgttgcgctggaattccagctgcatgttcaggtccagcgccttcttttcgcggaaatggtcgacctgcaccgagtggtcgaccaccaggtccaccggcaccagcggctcgatcttcttggggttcttgcccatcttctcggcgacgttgcgcatcgcggcgaggtcggccagcagcggcacgccggtaaagtcctgcaagaccacacgggccaccacgaagggaatttcgtcgacgcgctcggcgttcggcttccagttggcaagttgcctgacgtgctcttcggtgaccttcttgccgtcgcagttgcgcagcaccgattccaacaccacgcggatcgacaccggcagtcgcccgactgccacgtccagctcctcgcccaactggggcagggagtaatactggcccttgccggaagagccgatcttgaattcttttagcgtgttcttgaggttgtggggcattgccgtactccgatcgaaggatgatgcgatggcatttggctcggacctgaatcgagaccccggtgcgctgccgcggcatttgaccgcggtccgaggccggcagcgcactgcaactgcatactctaaccgccgcgcggctttggcgccacccggctcggcaacccgccggccgcgacggcgccggcccgacagcatgcccacccgggattggccgtccggcaaggcaaaaaagggcgctggcggccggaattcagcggccgccagcgccccggtacggacttactgcttgggtgctgcggattgctgggcgccttccggcacctgcgtcgggccgcccgggggcgtgaccagcagcggggtggtggccggggcgcgcaggccgccggcctgggtaggggccgcggcgccggcctgcatggcggcgctctggcagtcgtcggccaggcgctggcccaggttcttgttgaacagcatggccttgctcgggatcaccaccaggtccaggccggtgcgggcgtcatagtagcggtcggcgccggtcaccgtggcctggcgcggcagcttgtagtccttgccttgccagtgcacggtcaggacttcgtcgcgcagcatgtcgccggcgatatacaggttgttgcccagttcacactgccatttttcgccgttcggggtgaccgcggcagcagcgccggccgctgcggcggttccggcggccgccttcttcttggtcgaagccttcttgctggtggtcttcttggcgggttcctgcgccatcacggcggtggcggtggtcaggctgaatgcgccgatgcaggcggcaaggacaagatgtttcatattgtgagtgcctttcggatactgaaatcgatttatgtttcattcgccgccgtcaaaccgggcggcgccgggacaatttccgccgctattctctacgatttgcccagagcggcgtagtgctctggtctttggttacattatcgacgggggctagttggccccgcttcacttgcgcttgccgatcggcacgaacttcaggttctccggaccggtgtagttggcgctcgggcggatgatcttgttgtcgatgcgctgctcgataatgtgcgcggcccagcccgaagtacgcgcgatcacgaacagcggcgtgaacatcgccgtcggcacgcccatcatgtggtagctcaccgcgctgaaccagtccaggttcgggaacatcttcttgatgtcccacatcaccgtttccaggcgctcggcgatgtcgaacatcttcatcgagccggcatccttagacagcttcttcgccacttccttgatcacctggttgcgcgggtcgccggtggtgtacaccgggtggccgaagccgatcacgacttccttgttcccgacgcggcgcgtgatgtcggcctgggcctcgtcggggttgtcgtagcgcttctggatctcgaacgcgacttcattggcgccgccgtgcttggggccgcgcagcgcgccgatggcgccgctgatcgacgaatacatgtccgagcccgtgccggcgatcacgcgggcggtgaaggtcgaggcgttgaactcgtgctcggcgtacaggttgagcgaggtgtgcatggcgcgctcccacagcgccgacggcttctcgccgtgcagcaggtgcaggaagtggccgccgatggagtcatcgtcggtttcgacttcgatacggcggccgttgtggctgtagtggtaccagtacagcagcatcgagccgaggctggccatcagccggtcggcaatgtcgcgcgcgcccggggtgttgtggtcttccttctccggcagcacggtgcccagcaccgacacgccggtgcgcatcacgtccatcgggtgggcgctggcgggcacccattccaacgcggccttcacattggcgggcaggccgcgcaggctcttgagcttggccttgtaggcggccagttcggatttggtcggcagcttgccgtgtaccagcaggtgggcgatttcctcgaactcgcaggtctcggcgatgtcgaggatgtcgtagccgcggtagtgcaggtcgttgccggtgcggccgacggtgcacagcgcggtattgccggcggtcacgcccgacagggcgacggatttcttgacccggggcgcggccggctcgctggccgtggcgtcgggtgcagcgtcgggtgcggcgaacttcgaggcggacatccgtgtctccttgggcgctgccctgtttgtttttggtacgggtatcggcttcaggcgaaaaacaatgcctccacattggccggcagcggcgtgccggtggcctgcgcgcgctgcagcagcgaccagtagtagcggtagctggcgcggtcgtgcagctggccctcgtggcggatcggggcccagctgttctcgtgcgcggccagcaggatctggctggccgcgccgatttcttcggcaccggggcggaacgccgccacgatcggcgcgatctggcccggatggatgctccatttgcgcaggtagccgaactcgctgcgcgcgcgcagcgcatcgtcgccggcgcgctgcggcgcctgcacgtcggtgctgacgttgtgcaacggcaccttgccgtggcggtggcaggcggcggagatctccagcatggcgcggcggatcagcgggtgttcgaattgctgtggggagcgcatggcttcgcccgggatggcgccatgatgggccgagacaaagtccatcaggccgaagctcaggcattccacctgcaccagcgcggcaatatcgaaggcctgttccagcgcggcgtgggtctcgaccagcacatggatcgggatatgccgggcgatgccggcattgcgcgccacctggttgacatgatcggtcacgcgcgcaacctcgaccacgtcgctgaccttgggcaccaccacataggccaggcgcgcgccggcggcgcgcaccagcacgtcgacgtcctcgcgccagttcgggtgggccgggtcatggatgcgcacgccgacgcgattgtgggcattgagcgggctgttgaccagctgcgcgcacagctcggcatgctcgctctcacggccgacggcggcgccgtcctcgcagtcgaaggtgatgtcgaagaccgggccaagctcttgttgcagggcaagcgatttgcgcatcagcttttcgctgcccgcgtagtggtcacacaccggcaactggaccgggatggcttcgccctggaacaagacctcggaaggatgcacgttgattcggaccggtttgggttgaggggggagagcaaggggacatcgtagcccctggatattaaaaaaccggggtccgcactgattcgtgaatcgttgcggaaccccggtctttcctcgagcgatcggaggatcagcccagcaggtgctgcacgccggccttttcttcttccagttcgttcagggtgatattgatcttttcctggctgtaggcgtcgatctccagacccttgacgatctcgtacttgccgttggcggtggtcaccgggtagccgaacatggtgtcggccgggatgccgtattcaccgttcgacgggatgcccatggtgacgaccttgccgttggtgcccagcacccagtcgcgcacgtggtcgatggcagcgttggcggccgaagcagccgacgacaggccacgcgcttcgatgatggcggcgccgcgcttgccgacggtcggcaggaacacgtcgttgttccacaccgggtcgttgatcaggtccttgacgctcttgccgtcgacggtggcatagcggtagtcggcgtacatggtcgggctgtggttgccccacacgaacagcttctcgatcgacgacaccggcttgccggtcttggcggcgatttgcgacagggcacggttgtggtccaggcgcagcatcgcggtgaagttctcgcgcggcaggttcggtgccgacttcatggcgatgtaggcgttggtgttggccgggttgccgaccaccagcaccttgacgttgcggctggcgacttcgtccagcgccttgccctgcaccgtgaagatctgggcattggcttcgagcaggtccttgcgctccatacccttgctgcgcggacgggcgccaaccagcagggccacgtcggcgtccttgaaggcaaccttggggtcgtcggtgatgaccacgccggccagcagcgggaacgcgcagtcttccagttccatcaccacgcccttgacggcttgctgggcttgcgggaggtcgagcagttggaggatgaccggctggtctttgcccagcatgtcgccattggcgatgcggaacagcagggagtagccgatctggccagcggcgccggtcactgcgacgcgcattggggctttagccatgagtaaatctccaaacgatagaaggggggaagccggtcggtggcatgccgttgccgtaacaaggggtgcggcgggtcaccgggtgctggttgtcgccacagcggggagcggccgtccgccggagccaggtggcggggccacggggcggaaccggtgagggagagccacaacgggtcatggtgatgcaacaaagcgttagtctactgcgaagcgtggcgccatttccagaccggagcgctgccgagattctgccgggccgacacattccggtatcctgactgctgctggcgtgcctggggccatcgcgggcgtggaccagcgcgagtgtaggccgggcctcccgtgatgtcaactcatatgtcttatataagacataagacaattaacgtaaggctggacgtatcttgcccttttgtggtgaaatcccgctatgtcctccctgcctacgtccctgactggcgcagccgcacccggcgcgccggaatctggcgccgccacgcctggcgccggggcgcagccgccttcttcgccgcccgcgcctgtgccgcaggcggccccgcaatctggtcccgcctctggtctgcagtccgtgccgtcgcccaccttcagtccgctctaccagcagatcaaggcgctgatcacgcgcagcctgcaatccggcgaatggaagcccggcgagatgatccccagcgaaatggagctggcctcgcgctacaaggtcagccagggcacggtgcgcaaggccatcgatgaactcgccgccgagaacctggtggcgcgccggcagggcaagggcactttcgtgaccacgcaccatgaagacgtggtcaagttccgcttcctgcgcctcgtcccggacgaaggcgaaccccattatggcgccagccgcgtgctggaatgcaagcgcctgcgcgcccccgccgaaattgcccggctgctcgacatccgcaccggcgacagcgtggtgcagatccgccgcgtgctgaatttctcgggcgagtcgaccgtgctggatgaaatctggctgctcggcgccaacttcaagggcctcaccgctgaaaagctgaccgagtggaagggccccatgtatgcattgttcgaggccgagttcggtacgcgcatgatccgcgcctcggagaagatccgcgccgtgcctgccgatgaaaccgcggccgagttgctgtctgtcccggtaggctcgccgctgctgtcagtcgagcgggtgtcgtacacctatggcgaccgccccgtcgaagtgcgccgcgggctgtacgtgactacgcggcactattaccagaacgacctgagctgacgccggcgcatggcatgatgcgcccgctggcgttgattattgtggctttcgtcatgacggtgcgggctgttgcgcggcgcggctaatgttgcgctggattgcccgccggatgtgattggtgtgcgattgtcgggcggcacctgttggtgcctgatagctgaaaattattggtgcagcgcgcaacaaaggcgctaaaatctcatggatttgccctaatgcatcccgttgcatgcagggcagtggcagtttcgttttttgtttaccgcaaatggggtctcgcatggctgaagccgtcaaacaagccaggccggagtaccggaatatcggtatcgcgcagattgcgcgctaccggttgccctgggccggcaaggtatccatcctgcatcgcgtgagcggtgcactgatgttcctcctccttcccttcgtcctgtatctgtttgagcagagcataacttcggaactgagcttcgcaaagttctcggcgcttctgtccggtggcttcgtcaagctggttctgctggtcctgatctggggttatctgcatcacttctgcgcgggtatccgtttcctgctgctggatgtgcacgtcggcgtttccaagccggcctcggccaagtctgccatcggcgtgttggttgtgagcctgctgcttaccctgattttcggcctgaagctgttcggcctgttctgaggagaatcaaggtggcaaacaataatatcggtcccaagcgtcttgtcgtcggtgcgcactacggcctgaaagactggctggcgcagcgcgtcacggccgtgatcatggtggtcttcaccgtggtcctggccattgccttcctgctgtcgaacggcgcttcgtatgaagcgtgggcagggctcttctccaaccagtggatgaagatcatcacgttcctgaccatcctgtcgctgctgtatcacgcctggatcggcgtgcgcgacatctggatggactatgtgcgtccgatggcggttcgcctcgtgctgcaagttcttacgattctgtggctcgtcggttgcgcgggctacgctgctcagattctctggagggtgtaataaatggtcgcagtcaagactggattgccgcgtcgccgtttcgacgtggtcatcgtcggtgctggcggcgccgggatgcgcgcatccctccagctcgcggaagccggcctgaacgtggccgtgctgtccaaggtgttcccgacgcgctcgcacacggtggcggcacagggcggcatcggcgcttcgctggggaacatgagcgaagacaactggcactaccacttctacgacaccatcaagggctcggactggctgggtgaccaggacgccatcgagttcatgtgccgtgaagccccgaaggtcgtgtacgagctcgaacacttcggcatgccgttcgaccgcaaccccgacggcaccatctaccagcgtccgttcggcggccacaccgccaactacggtgaaaagccggtgcagcgcgcctgcgccgcggctgaccgtaccggccacgcgctgctgcacacgctgtaccagcgcaacgtgcgcgccaagacccacttcttcgtcgagtggatggcgctggacctgatccgcgaccaggacggcgacgtgctgggcgtgaccgcgctggaaatggaaaccggcgaggtctacatcctcgaagccaagaccacgctgttcgcgaccggcggtgccggccgtatctatgcagcttccaccaacgccttcatcaacaccggtgacggcctgggcatggcagcgcgcgcaggcgtgccgctggaagacatggagttctggcagtttcacccgaccggcgtggccggcgcgggcgtgctgatcaccgaaggcgtgcgcggcgaaggcggtatcctgcgcaacaaggacggcgagcgcttcatggagcgctatgccccgacgctgaaggacctggcgccgcgtgacttcgtctcgcgctcgatggaccaggaaatcaaggaaggccgcggctgcggcccgaacggcgactacgtgctgctcgacctgacccacgtcggtgccgagaccatcatgaagcgcctgccgtcgatccgcgaaatcggcatgaagttcgccaacgtcgacgcgatcaaggaaccgatcccggtggtcccgaccatccactaccagatgggcggtatcccgaccaactatcacggccaggtcgtggtgcctaagaacggcaacccgaacgaagtcctgaacggtttctacgcgatcggcgaatgctcgtgcgtgtcggtgcacggcgccaaccgcctgggcaccaactcgctgctggacctggtggtgttcggccgcgccgccggcaaccacatcatcgcccagaacctgaagcagaaagagcacaagccgctgccggccgacgccgccgacctggcgctgtcgcgcctggccaagctgcagtcgtcgtcctcgggcgagtacacgcaggacgttgccaacgacatccgcaagaacatgcagtcgcatgccggcgtgttccgtacccagaagctgatggacgaaggcgtcgagcgcatcctggaagtgtcgcagcgtgccgacaacatccacctgaaggacaagtccaaggtcttcaacaccgcgctggtggaagccctcgaagtggccaacctggtggaagtggccaaggccaccatgatctcggcggccgcccgcaaggaatcgcgcggtgcccacgcgcacagcgacttcccgaatcgcgacgaccagaactggctcaagcacacgctgttctacagcgaaggcaaccgcctcgactacaagccggtgaagatggaaccgctgacggtggaaagcgtgccgccgaaggcccgtaccttctgagcaccgcatcgtagagacaacaggacccacagaaatgaagcgtattttcgaagtctaccgctacgatccggacaaggatgcggcaccgcgcatgcagacctacgaggtcgagctggacggtcacgagcgcatgctgctggacgcgctggtcaagctgaagaagctggacgagaccatctcgttccgccgttcgtgccgcgaaggcgtgtgcggctcggacgcgatgaacatcaacggcaagaacggcctggcctgcctgaccaatatgcgcgagctgccggaccgcatcgtgctgcgtccgctgcccggcctgccggtggtgcgcgacctgatcgtcgacatgacgaacttcttcaagcagtacaactcgatcaagccgttcctgatcaacgacgagccgccgcccgagaaagagcgcctgcagtcgccggaagagcgtgacgagctggatggcctgtacgagtgcattctctgcgccagctgctcgacgtcgtgcccgtcgttctggtggaacccggacaagttcgtcggccccgccggcctgctgcaggcttaccgcttcatcgcggacagccgcgaccaggccaccaacgagcgcctggacaacctgaacgacccgtaccgcctgttccgctgccacagcatcatgaactgcgtcgatgtgtgcccgaagggtctgaacccgaccaaggccatcggcaagatcaaggagctgatggtccgccgcgcggtctgagcctgcggctgtctgcagtagtaagcggcgcgtcagccagagcggctatatctggctggcgcgccgaaagtaggaagccatgactgagagtcctgccaccaccttctcccatcaggccgacccgcacaagcgcgcacgtctgcgctggcgcgcccgccgcggtctgctggagaacgacatcatcgtcgaacgttttttcaaccgttacgaggagagcctgtccgacgaggacgtggcttcgttgagcgagctgttcgaactcagcgacaacgagttgatggacctgctccttgcgcgcaaggaactggacggtgagctcgacacgcccccgatgcagcgagtgatcaccctgctgcgtacggtctgagttttggtcaacattattattcacagcatttgaaggatccgacatgacgccgtccgatgtgaaagccacgctatcgttctccgatggttcccccagcgttgagctgccgatctacacgggtaccgttggcccggacgtaatcgacattcgcaagctgtacggacagaccggtaagttcacctacgaccccggtttcatgtcgacggcttcgtgcaattccaagatcacctatatcgacggtgacaagggcgaactgctgtaccgcggctacccgatcgagcaactggcgcagaagtgcgaccacctcgaaacctgctacctgctgctcaagggcgaactgcccaacgccaagcagaaggaagaattcgtcggccacgtgatgaaccacaccatggttcacgagcagatgcagttcttcatgcgcggcttccgccgcgacgcgcacccgatggccgtgctgaccggcatggtcggtgccatgagcgcgttctaccacgacgcgatggacatcgacgatccgcaccagcgcgagatctcggccatccgcctgatcgccaagatgccgaccctggtcgccatggcgtacaagtacaacatcggccagccgtacatctacccgcagaacgacctgtcctactcgggcaacttcatgcgcatgatgttcggcacgccgtgcgccccgtacaccgtgaacccggtgctggagcgcgcgctggaccgcatcttcatcctgcacgcagaccacgagcagaacgcgtcgacctcgaccgtgcgcctggccggttcgtcgggcaccaacccgttcgcagccattgccgccggcgtggcctgcctgtggggcccggcccacggcggcgccaacgaagccgcgctgaagatgctggaagaaatcggcagcgtcgacaacatcaacgagttcatcaagcaggtcaaggacaagaactcgggcgtgcgcctgatgggctttggccaccgcgtgtacaagaactacgatccgcgcgccaagctgatgcgcgaaacctgccacgaagtgctggaagagctgggcctgcacaacgacccgctgttcaagctggccatggagctggaaaagatcgcgctggaagacgagtacttcgtcagccgcaagctgtacccgaacgtggacttctactcgggcatcgtccagcgcgcgctgggcatcccgacctcgctgttcacctgcatcttcgcgctggcccgcaccccgggctggatctcgcagtgggaagagatgattaccgatccggaatacaagatcggtcgtccgcgtcagctgttcgttggcgcagctacccgcgacgtgccggacgttgccaagcgctgatcgctggcttgtcatccggctgcgcgatgcagcaatcacaaacgccccggcccgccggggcgtttgtgtttctgggccggagtgccttgtgcgtcgcagcagggcagggagcaggaaattgccggataagtggtgagaacggcaatttgcggagaattgtgtctcagtctgtcaattcagttccgcatttgttgtgcgattttcgcctacggcaggaaatttgaccctataatgcgggctgctttgccgacggcagccgggccacccttccggcatgcggtgcggcaagcggggcaggcgaatcgcttgcgcaatagagaacgcatcaaacgttgtctttccgaaccttggtccccgtacctcagcgggactgacacatgccgggccccgcataagctgtctctcccttgcaggcccgtcttccgcgtctcgggcgtctttattcgtagtccgcgggtgttgttcgattgcgcaggtcacaccgtttctgcccggttgacccaaacataaatcgaggagctcctgatgacgctgtcccgtcttacgtccatctcgctggccgccgtgctggccacccttggcgccgctgccaacgccgaaaccgtgaagatcgccattgccggcccgatgagcggctcggtggcgcagtatggcgacatggtcaaggccggtgcgctgaccgcgatcgaacaactcaatgccaacggcggcgccggcggcaacaagttcgaagtggtgatgatggacgacgcctgcgagccgaagcaggccgtggcagttgccaacaagatcgtcagccagaacatcaagtacgtgatcggccatgtgtgctcgggctcgaccatcccggcttcggacatctacgagaacgaagggatcgtcatggtcacgccgtcggcgaccgcaccgcagctgaccgagaccaagaagcgcaagtacatcttccgcaccatcggccgcgacgaccagcagggcccggccgccgcccagtacatcatcggcaaggtcaagccgaagaaggtcgcggtgctgcacgacaagcagtcgtacggccagggcatcgccagctcggtgaagaaggacctggaagccgccaagatcccggtcgccgtgttcgaaggcatcaacgccggcgattcggactactccgccgtcatcaccaagctcaagtcgcagggcgtggacttcgtctacttcggcggctaccacccggaaatgggcctgctgctgcgccaggcgcgcgagcagggcgtgaaggccgcgttcatgggccccgagggcgtgggcaacaaggacgtgacggcgatcgccggcccgtcctcggaaggcatgctggtgacgctgccggcagacttctcggccgacccggccaacgccgcgctggtgaaggcctttgccgacaagaagcgtgacgccaacggtccgttccagatgccggcctatgccgccgtcaagatcatcggcgacgccattgccggcgccaagagcaccgacccgaccaaggtcgcggcgtacatgcacaagaacgccttcaccaccccgatcggcaaggtcgagtacgacgacaagggcgacctgaagtccttcaagttcgtggtctacacctggcacaaggacgccagcaagacggccgccaactaagccggagcttttccacgcacacgccccgcccggaccccgggcggggcgttctggtatcgggcttcaagttcctgaggcttccccaatgaatgaattccttccacagttcacccagcagctggtcaacggcctgacgctgggtgcgatctatgcgctgatcgccatcggctacacaatggtctacggcatcatcggcatgatcaatttcgcgcacggcgagatttacatgatcggtgcctatgtcggcctggtcacgctcaccgcgatcggcgcccaggcaggctaccccctgccgctggtgctgggcgccgccttgctggtctcggtgctggtcactggggtgtacggctatgcggtcgagcgggtggcataccggcccttgcgcggcggaccgcggctggtgccgctgatctcggccatcggcatgtcgatcttcctgcagaactatgtccagatcgggcagggcgcacgcgacgtgtcggtgccggtgctgatctcgggcgccatcgagttccagatgggcagtgacttcaccgtgacggtgccgtactcgcgcctgctgatcgtcggcgtgacgctggtgctgatgatcgcgctgacgctgtttatcggccgttcgcgcatgggccgtgcctgccgagcctgcgccgaagacatgcgcatggccaacctgctcggcatcgacaccaacaaggtgatctcgttcaccttcgtgctgggtgcgatgctggcggcggtgggcggcgtgctgatcgggctgaccatcggcaagctcaatccctttatcggctttatcgccggcatcaaggcctttaccgcggcggtgctgggcggcatcggcagcatcccgggcgcgatgctcggcggcgtgctgctgggcctggcggagaccttcgcctcgggctatatgccggccgagtacaaggacgtggttgcgttcagcctgctggtgctggtgctgctgttccgtccgaccgggctgctcggcaagcctgacgtcgaaaaggtctgaaagaggacgagacatgaccaacaacgtttccgcgatgcccgcgggcaaggccgccgcacgcggcgccgcaccgggacaatcgctcaagaatgcgatcacggccgccgtgatgacggccatcctgaccattcccatcctgggcctgcagctcaagctggaaggctacaaggtcgtgctggagccgcactggcggccggtgtggatcgccgtggcggcggtcttcctgttccagctgttcaagccgctgctgtcgcgcgccggcagcgcggtgcgcctgccggcggtgccgcagctgggcgcccggcagcagcgcgcggcggtatggatgctgctggcggtcgggctggtgtggccgttcttcggctcgcgcggcgcggtcgacgtggccacgctggcgctgatctacgtgatcctgggcctgggcctgaatatcgtggtgggctatgccggcctgctcgacctgggctatgtcggcttctacgccatcggcggctacacctacgcgctgctcaaccagtatttcgggctgggcttctgggaatgcctgccgatcgccgccgcgatgtcggccaccttcggcttcctgctgggtttcccggtgctgcgtttgcgcggcgactacctggccatcgtgacacttggcttcggcgagatcatccgcctgctggccaacaacctgaccagcctgaccggcggcccggatggcgtgtccggcatcccgaagccgaccgtgttcggcatcgagatggcgcgcagcgcgagcgtggagggcgccaagacctttcatgacctgctgggctgggactacagcggccagcacatggtgatcttcctgtacctgctggcgctgctgctggtgggcttcacgctgttcgtcaccagccgcctgatccgcatgccgatgggccgcgcctgggaagcgctgcgcgacgacgagatcgcgtgccgctcgctgggcctgaacccgacccgcatcaagctgtcggcgttcacgctgggagcttcgttcgccggcatcggcggcgctttcttcgcggcgcgccagggcctggtcaatccggaatcgttcaccttcatcgagtcggcgctgatcctcgccgtggtggtgctgggcggcatgggttcgcagctgggcgtgatcctggcggcgatcctgctgacggtgctgcccgaggtggcgcgcggttttgccgaatatcgcatgctgatcttcggcctggtgatggtgctgatgatgatgtggcgtccgcagggcctgctgcccgcgagccgtccccacgtggagttgccgaaatgagcgcggatttgctgaaagtctccggcctgcagatgcgcttcggcggcttgctggccgtggacggtattgatttcaatgtgcgcagcgacgaggtcttcgccatcatcggccctaatggcgccggcaagaccacggtgttcaactgcgtgggcggcttctacaagcccaccgcgggcgaggtcacgctggacggccacgccatcgccggcctgcccagccaccaggtagcgcgcaagggcctggtgcggaccttccagaacatccgcctgttcaagtcgctgacggtggtggaaaacctgctggtggcgcagcaccgccaggtgcaggcgggcatcctgcgcggcctgttcgccacgccggcctaccgccgcgccgagcgcgaggcgctggagcgcgccgcggtctggcttgaacgcatggggctgacctcggtggccaaccgcgaggcgggcacgctgtcgtacggccaccagcgccggctggagatcgcgcgctgcatgatcaccaagccgcgcctgttgatgctggacgagccggcggccggcctgaacccgcaggagaagatcgagctgcagcagctgatcgaccagctgcggcgcgagttcggcattgccgtgctgctgatcgagcacgacatgagcctggtgatgggcgtgtccgaccgcatcctggtgatggagcacggcaagccgatcgttacggccgcgcctgaggaagtgcgcaacgacccgcgcgtgatcaaggcctacctgggagaggactgatgctgaagctggaacaggtccatacccactacggcgccgtcgaggcgctgtcgggcgtatcgatcgaagtcaacaagggggagatcgtcaccctgatcggcagcaacggcgccggcaagacgacgctgatgatgaccgtgtgcggcacgccgcgcgcgtccagcgggcgcgtgacgttcgaagggcaggacatcaccaaccggtccacgcacgagatcatgcgcttggggctcgcgatctcgcccgagggccggcgcgtgttcccgagcctgacggtgctggagaacctgaagatgggcgcgttcttcgccaggcgcgacgagatcgaggcgggcatcgagcacgtgttcaagctgttcccgcgcctgaaccagcgcgccagccagcgggccggcaccatgtcgggcggcgagcagcagatgctggcgatcggccgcgcgctgatgagccggccgcgcctgctgctgctggacgagcccacgctcggtctggcgccgctgatcatcgcgcagatcttcgacatcatccgcaccattcgtgacgaaggcgtcactgtgttcctggtcgagcagaacgccaacaaggcactgcaggtcgcggaccgcggctatgtgctcgaaaccggcaaggtggtgctggccgataccggcgccaacctgctggcaaacgaccggatcaaggccgcctacctgggcggctgatcccaagaggccgcggccccgcctggcgggccgcggccttttccttttcgccatccgcgaaatccccctttcgccaatcacattacattgcagccgctgcccgggccgggcagggggctgaccgccacaccccctgtggcataatcaattgccaagtcaagcattgcggcaacgcttgaaataacgctcgcttcaggcggcttccggcgcgattatcgctatcgccacccgctcgccaccgcgaccgaagcgaataaaacccctgcaaactaccgcgcggtcaccgcggaccactcctgcaaaggatcggtcttccggcccgccatcgcatcatggccaagacgctctacgacaaactctgggatgaccacaccgtccacgtcgaggaagacggcaccacgctgctctacatcgaccgccacctgctgcatgaagtgaccagcccgcaggcgttcgaagggctgaagctggcggagcgtccggtatggcgcatcagcgccaacctggccgtgtcggaccacaacgtgccgaccaccgaccgcagccacggcattgccgatccggtgtcgaagctgcaggtcgatacgctggatgccaactgcgacagctacggcatcacccagttcaagatgaacgaccaccgccagggcatcgtgcacgtgatcgggccggagcagggcgccacgctgccgggcatgacggtggtgtgcggggactcgcataccagcacgcatggcgcgtttggcgcgctcgcgcatggcatcggcacctcggaagttgagcatgtgctggctacccagacgctgttgggcaagaaggccaggaacatgctggtcaaggtggaaggcaagctgccgcgcggctgcaccgccaaggacatcgtgctggccgtgatcggcaagatcggcaccgcgggcggcaccggctacaccatcgagttcgccggctcggccatccgcgacctgaccatggaaggccgcatgacggtctgcaacatggccatcgaggcgggcgcgcgcgccggcctggtggcggtggacgacgtcacgctcgaatacgtgaagggccgcccctacgcgccgcagggcgtggagtgggagcaggccgtggcctactggcgcacgctgcattcggatgccggggccaagttcgaccaggtggtcgagctgcgcgccgaggacgtccgtccgcaggtgacctggggtacctcgccagaaatggtgatcagcatcgaagaccgcgtgccggatcccgagaaggagaaggacccgaacaagcgcaacgcgatggagcgcgcgctcgaatacatgggcctgcagcccaacgtgccggtcgagagcatcaatatcgacaaggtcttcatcggttcgtgcaccaacagccgcatcgaagacatgcgcgccgccgcgtgggtggtgcagaagctcggtcgcaaggtcgccggcaacgtgaagctggcgatggtggtgccgggctcgggcctggtcaaggaacaggccgagcgcgaaggcctggacaagatcttcaaggccgcgggctttgaatggcgcgagccgggctgctcgatgtgcctggccatgaatgccgaccgcctcgatcctggcgagcgttgcgcgtcgacctcgaaccgcaacttcgaaggccgccagggcgcgggcgggcgcacccacctggtgagcccggcgatggcagcggccgcagccatcgaaggccatttcgtcgatatccgcaagctgggctgaagaagcaaggaaagagaacatggacaagttcaccgtacatagcggcctcgtagccccgctcgaccgcgagaacgtcgataccgacgccatcatcccgaagcagttcctgaagtcgatcaagcgcaccggcttcggccccaacctgttcgacgagtggcgctacaaggacgtcggcgagcccggcatggacaacagcaagcgtccgctgaacccggacttcgtgctgaaccagccgcgctaccagggtgcgtcgatcctgctggcgcgccgcaacttcggctgcggcagctcgcgcgagcacgcaccgtgggcgctgacgcaatacggcttccgcgccgtgatcgcgcccagctttgccgacatcttcttcaacaactgctacaagaacggcctgttgccggtggtgctgaccgaacagcaggtcgaccacctgttcaacgagaccaacgccttcaacggctacaagctgaccatcgacctggacaagcaggtggtgctgacggcgggcggccaggcgtatgagttcgacatcgccccgttccgcaagtactgcatgctgaacggcttcgacgatatcggcctgacgctgcgccatgccgacaagatcaaggcctatgaggccgagcgcgtggccaagatgccgtggctgaacaaccgcctggtcggataagactcaacgaggaaagacaacaatgaagatcgcagtcctgccgggtgacggcatcggtcccgaaatcgtcgcggaggccgtcaaggtcctgaacgcgctcgacgagaagttcgaactggaaaccgccccggtgggcggcgccggctacgaggccgaaggccatccgctgccggagaacaccctgaagctggccaaggaagccgacgccatcctgttcggtgccgtcggcgactggaagtacgacagcctggatcgtccgctgcgcccggagcaggccatcctgggcctgcgcaagcacctgcagctgttcgccaacttccgcccggcaatctgctatccggagctgaccggcgcttcgagcctgaagcccgagctggtggccggcctcgacatcctgatcgtgcgcgaactgaacggcgacatctacttcggccagccgcgcggcgtgcgcgaagcgccggacggcctgttcaagggtgcgcgcgaaggcttcgacaccatgcgctacagcgagcccgaaatccgccgcatcgcccacgtggcgttccaggccgcggccaagcgcggcaagaagctgtgcagcgtcgacaaggccaacgtgctcgagaccttccagttctggaaggacatcgtgatcgaggtgcacaaggagtacccggaggtcgaactgtcgcacatgtacgtcgacaacgcggccatgcagctggtcaaggcgcccaagagcttcgacgtgatcgtcaccggcaatatgttcggcgacatcctgtcggacgaggccgccatgctgaccggctcgatcggcatgctgccgtcggcgtcgctggatgccaacaacaagggcctgtacgaaccgtcgcacggctctgcacccgacatcgccggcaagggcgtggccaacccgctggcgacaatcctgtcggcggcgatgatgctgcgctactcgctgaaccgcgccgagcaggccgaccgcatcgagaacgccgtcaagaaggtgctggcccagggctaccgcaccggcgatatcctgacgccgggttgcaagcaggtcggcacccgcgagatgggtgacgctgtgctggcggcactgtaagtcacaccggaagggggcactgcgcgagtaatgccccctttgtctgatttgtccccgttatttcccctatctgcacgctgcggcagcgccgcaaaatcgtgtagactctgccgatggcccgattttcccagtccaccctgactgctgttgctgccctgaccgctacccgcggcccggtcggcacgatttcgctcggccagaccgcaacgacgattaaaaccattattaaaaccgcgatcgcctagatccgttcgtcgtgcctgcccgtcttccccgcgcagccacgccgggcgaggaaaatggcggggaagtaaaaatcacatccgaggtaaatcatgattgtaggtctcgtcggttggcggggaatggtcggcagcgtcctgatgcagcgcatgcaggaagagcgtgatttcgaccagatcgagcccgtcttcttcagcacgtccaatgccggcggcaaggcgcccgccatggcgaagaacgaaaccacgctgaaagatgccaatgacatcgaagcgctgaagaagtgcgacgtggtgctgaccgcccagggcggcgactacaccaacgaggtcttccccaagctgcgcgcggccggctggaagggctactggatcgacgcggcctcctcgctgcgcatgaaggacgatgccatcatcgtgctggatccggtcaaccagggtgtgatcaaggacgcgctgtccaagggcgtcaagaatttcatcggtggcaactgcacggtcagctgcatgctgatgggcctcggtggcctgttccaggccgacctgatcgagtggatgacgtcgatgacgtaccaggccgcttccggcggcggtgcgcagcatatgcgcgagctgctgacgcagttcggcacgctgaacgcgtcggtcaagccgctgctggacaacccggcctcggccatcctggaaatcgaccgcaccatcctggcgacccagcacggcctgtccgccgaggaaaccaagcagttcggcgtgccattggccggcaacctgatcccctggatcgacaaggacctgggcaacggccagtccagggaagaatggaagggcggcgccgagaccaacaagatcctgggccgcggtgaaggcttcctgggtgcgaccggcgccacgccgatcgccgtcgacggcctgtgcgtgcgcatcggcgccatgcgctgccactcgcaggcgctgaccatcaagctgcgcaaggatgtgccgctcgatgagatcgaaggcatgctcgccgcccacaacccgtgggccaaggtggtgccgaacacgcgcgacgccagcatgaccgacctgacgcccgcagcagtgaccggcacgctgaacatcccggtcggccgcctgcgcaagatgcagatgggcggcgagtacctgtctgccttcacggtcggcgaccagctgctgtggggcgcggccgagccgctgcgccgcatgctgcgtatcctgatcgagtcctgatccggtgctcccgcctgttgcctggttgcgtccgttgcagccaggcaacagaatggaccgctttgcagacaacgccgcgcccgtgcgcggcgttgttgtatccggacgcctattttccctggtgatgcgtcacaatacgccggcatgcgcttcgcgccaggcagggtttggcgtctgcgcgcggctggagaaggggtgcgccgagaacgccccgccagcctgccggacctggttttggggtcggtctgtcgattcatatcgctactaaaacataacggagcataaggtgagtgtgagccaacatcgccggaaagatgcgcctactgtccgtcagcgctggtcaacgctggccgtcacggcactgggcctgctgcttgcgcagccggccgcatatgccgcggggttcgggcaattgcgggttcagtcgaatctgggtcagccgctgcaggctgagatcgacatcagtggggtcagtgccgaagaggccgccgggctcagtgtcaagctggcgtcgccagcggcgtatgccgcggccgggctgacctacctgccggccgtcagcagcctgcggctggaggtggagcgccgcccgaacggcagctatgtggcccgggtccgctccaaccagccgatcagcgagccctttgtcgacatcctggtcgacatgagctgggccagcggcaaggtctcgcgcgcctataccttcctgcttgaccccgccgggaccaagccttcgaaccagactttctcgccggcgacggtggtgcaggcggcgacgccggatgcgccgcccgtagcggcaccggcacctgccgccgcgccgcagcctgcgccggcccaggaagctgcgccggccgcggctgccgaggcagtcaagccagccgtgcccgcgcgccctgcccgccagagcgcaaagcgggcgccggcaccggccgccagcggcagcaccgagatggcacccggcggcggctacaccgtgcagcgcggcgacacgctctacgccattgccggcgaggccgtgcaaggccaggaatcggtctcgctggaccagatgctggtggcgctctaccgcaacaatcccaacgcctttatcggcggcaacatgaaccggctgcgcagcggcgcggtgctgcaggtcccgacccagcaacaggcgcaagccgtcgcacccaaggccgcccgccgcgaggtggtggcgcgcacgcagggcttcgatgcctaccgcggccggctggccagcgctgccgcggccaagtcggtcgagcccgacagcggccgccagcagtccggcaacgtgaccgcccgggtgcaggagcaggccgccccgaccgacggcccgcgcgatgaactgaagctcagcaaggccgcgcgcggcgcgcaggccgacgccgcggccaaggccgaagccggcgtcgcgcgcgagcgtgaactcaaggaggcgcaggcccgcctggcgcagctggaaaagaacgtcggcgacatgcagaagctgctcgagctgaagaacgccgagatcgccaagctgagccaggccaaccaggcggtgctggccgagaaggaaaaggctgaggccgcggccaaggccgcggcggcggcgccgaccgtggtggcggcccagccgccgaaggccgatgccgtggccccggccccggttgcggccgccgcgacggctgccgcaaccgcagcgaccgcagccagcgccccggcagcggccggcgccagcgccgcggacgccgtggcgcctgcggcagtctcagccgtggcagcggcccccgcttcgcagccggctgccgccgttcctgccagtgcaacgcaggccgccgccgcatcggcccccgcggccaagcgcccgccggtggtggcggcccagcccgagccggtgcccgaaccgtcgttcatcgatggcctgctggccaaccccatgctgctgcccggcggtggcctgctggtggcgctgctcggcgtctatgcgatctatcgccgccgccagcagcagaaggcgggcgaggcgaccggcttcggcgacagcatcctgtcgcaggaaagcacggtgatggccggtgccaattcgctgttcggcacggccggggggcagagcgtcgacacctcgcagcacagcgtgttcggcgcggacttccgcatcggcaacaacacgccggaagccaacgaggttgacccgatcgccgaggccgaggtctatatcgcctatgggcgcgatgtgcaggcggaggaaatcctgcgcgaagccctggagaagaacccggagcagcagccggtgcggctcaagctcctggagatttacagcaacagacaggatgtggaaggtttccgcgtgattgcagaagaaatgttcgcccagaccggcggacacggggcggaatggctgaaggcagcagaaatggggcgcgcgctcgagccgggcaacgcgctcttcctggcggtgacgcccgaagcggcggggccggatacgacctcgccggcaaccgaccagtggcgcacccaggacccgtcgcagaatccggcctcgatcccgcggctggagccgtcgctgggtgacctggcgctgccgctggatgccttcccggccccggcggccggcgagccgatcgtggcgcctgcttccgcggcgatggtgtttggcgctgacgcgcacgacgccggcgagccggtacggctggatctcggcctgcctcgcaccggcgccgacccgcttgccgatgacgtgcccaccctcgacacgccgacccgcagccgtccgctggagttcgacatgtccgggctgtcgcttgacctgggcagcgccgcgcaagccgacgcccgcggcaaggatgtgctggacgaggccaccatgccgctgcccgccaccaccatgctgcgcgacggcaagctggccgagccgatcgacctgtcgcgcgtggcgcctgaaaccggcggcgacctcacgcacgggggttcgccgagcacgctgtcggtcgacggcgtggacggcgggcgggacatgcagatcaagcttgacctggctcgtgcctatatcgagatcggcgacaaggaaggggcgcgcgaactgctgcaggaagtggtcgagcagtcgcaggatccgctgcaggcggaggcccgttcgctgctgcaggaagtggcctgagctatcattgacggtccggccgcggcacgcgctgccgcagcctgaagcgatgcgccggaagcgtcccttccggcgcatttgctttttcggcggacctggcgtgaaccgctgcgtccggacgtacccgccgccttgcccgatcccctgacatgaaccgcatcgctcttggcctgcactacgacggcgccgccttttccggctggcagtcgcagccgcaccgcaataccgtgcaggatcacctggaaaacgccatcgagcgttttgccggggtgcgcctgctgaccaccgtggcggggcgcaccgataccggcgtgcatgcgctcggccaggtcatccacctggacaccgcgctcgagcgcgagccattttcctgggtgcgcggcgtcaacgccttcctgccgccgtcgatcgcgctgcaatgggcgctgccggtggaccagggtttccacgcgcgtttcctggcgttcgagcgcatgtattactacgcgctctacaccgggccacaccgcgtgccgctggtgcacggccgcgccggctaccagatgctgccgccgggccagcggctcgacgtcgacgccatgcgcgaggccgccgcatgcctgctcggcgagcatgatttctccgccttccgcgccgccgaatgccaggccaagtcgccggtcaagaccatgtacgacgtcaccatcagggatgacggcaactgggtgttcctgcgctttcgcgccagcgccttcctgcaccacatggtgcgcaacctgatgggctgcctggtggcggtggggcgcggacgctaccccgcgcactggctggcgcaggtgctggccgggcgcgagcgcaagctggcggcgccgaccttcatgccggacggcctctacctggtcggcgtcaagtatcctgatccttaccagatccccgcggccgatccgtccgcgagcctgttccatggagtgttcgatgacgcagcctgaggccgctgaaggcagcacggcgggcagcacagtgcacatgccggcccgcacccgcatcaagatctgcggcctgacgcgcgaggacgacgtgcgcgccgccgtggacgccggcgccgatgccatcgggctggtgttctacccgaacagcccgcgctgcgtcgacgtggcgcgcgccgcggcgctggccgaggccgccgggccgttcgtggcgatcaccgggctgttcgtcaatgccgacctggaagacatcgcccatgtggccgagcgcgtgccgctgacgctgctgcaactgcacggcgacgagaccccgcagttctgcacgcaggcggcgcagcgctgccggctgcccttcatgcgcgccgcccgtgtgcgcccggggcttgatttggtagaatttgccgatcaataccgtgatgccgctgccttgctgctcgatgccttcgtcgaaggctacggcggtggcggccacgtcttcgactggaccctgattcccccggcatggcttccgcctactcccccggtaccagctaccggcaacccgaacgcaagcggcgctcctcgcatcgttttgagtggtgggttgaacgcgcaaaacgtcgctggcgcgattgaacgcgtgcggccctacgctgtggacgtcagcagcggggtagaggccgccaagggcgtgaaggaccacgcccgcatcgccgcgttcgtgcgcgctgtgcgcagtgccgaggcaggatgagccgggccgtgtcccgcgtctttccccatgccgcccgtggcctgccgcatgcgcgcacacgcatcgcagtcaaccatgcgcccttgccggatgaggcaaggccgctgttccgaagagtctagacatgtacgacttgcccgattcccgtggccatttcggcccctatggcggcaccttcgtgtccgaaacgctggtccacgcgctcgatgagctgcgcgaggcctatgcgcactaccagaaggatccggagttcgatgccgaataccgccgcgaactgaagcactttgtcggccgcccgtcgccgatctaccacgcgcagcgctggagcgagacgctcggtggcgcgcagatctacttcaagcgcgaagacctgaaccacaccggcgcgcacaagatcaacaacgtgatcggccaggcgctgctggccaagcgcatgggcaagccgcgcgtgatcgccgagaccggggcagggcagcacggcgtggccaccgccaccattgccgcgcgcttcggcatggagtgcgtggtctacatgggggccgaggacgtcaagcgccaggccgccaacgtctaccgcatgaagctgctgggcgccaccgtggtgccggtggaaagcggctcgcgcacgctcaaggacgcgctcaatgaagccatgcgcgactgggtcaccaacgtcgagaacaccttctacatcatcggcaccgtggccggcccgcatccgtacccgatgatggtgcgcgacttccagtgcgtgatcggcgaggaagccaaggtgcagatgccggagatgacgggccgccagccggatgccgtgatcgcctgcgtcggcggcggctccaatgccatgggcatcttctacccgtatatcgagcaccaggacgtgcagctgatcggtgtggaagccgccggcgacggcctcgacaccggccgccacgcggcctcgctgaccggcggcacgccgggcgtgctgcacggcaaccgcacctacctgctgcaggacgccaacggccagatcatcgagacccattcggtgtcggccggcctggactacccgggcgtgggccccgagcatgcgtggctcaaggacagcggtcgcgcgcagtacgtgccgatcacggatgaagaagcgctcaaggccttccacgactgctgccgcatcgagggcatcatcccggcgctggaatcgagccacgccatcgcctatgcctgcaagctggcgccgacgctgcccaaggacaagctgctgctggtgaacctgtccggccgcggcgacaaggacatgcacaccgtggccgagcgcgcggggctcaagctctgatgcgcgcgctgcctccgaccggacttgccgtgggcggcgcgggcgcgccggatgcgtccggagcgcccgattccgcccagctgcgcctgttccaggaagacatgttcgagggcattgcccgcctgccggacggctcggtcgacctgatcgtcgccgatccgccctacgggctgggcaaggactacggcaacgattccgacctgctgtcgggccaggagtatctggactggtccgagcgctggatgaacgcggtcgtgcccaagctcgcgcccaagggaacgctctacctgttctgcacctggcagtattcgcccgagctgttcgtgatgctcaagcggcgcctgaccatgatcaacgagatcatctgggaccgccgcgtgcccagcatgggcggcaccacgcgcaagttctcgtcggtgcacgacaacatcggcttttttgcccgcgcgcgcgactactacttcgatctcgacccggtccgcattccctacgaccccgagaccaagaaggcgcgcagccgtccgcgtttcgaaggcaagaagtggctggaggtgggctacaacccgaaggacctgtggagcgtctcgcgcatccaccgccaggacccggagcgcgccaaccacccgacgcagaagccgctggaaatcgtcgagcgcatggtgctgtcaagctgcccgccgggcggcctggtgctggatccgttcgccggcagcggcaccaccgcggtggcctgcctgcgccacggacggcgctttgccggcttcgagatcaacccggagtatgtgcaggtggcatgcgatcgcgtgtctgccgccgctgcagcccttgccgtcacgaatgcagccgccgagcctgccgccaccccaaccctggccgccgccaacgacgatgtctcgccggcgccgcggcctcacctgattccctgatatgtcccgtatccagaagacgttcgcggcgctggccgcgcagcagaagaagggcctgattccgtttatcaccgccggcgatcccgagcccggcctgaccgtggcgctgatacatgcgctggtggcgggcggcgctgacgtgatcgagctgggcgtgccgttctccgacccgatggccgacggcccggtgatccagcgcgcctccgagcgcgcgctggcgcagggcgtgtcgctgacccaggtgctgcagtgggtgcgcgagttccgccagaccaatgccgataccccggtggtgctgatgggctacgccaatccgatcgagtgcatgggcgagcaggtctttgccgccgccgcgcgcgaagccggcgtcgacggcgtgctggtggtcgactatccgcccgaggagtgcgagtcgttcgccacgctgatgcgcgacaacggcatggacccgatcttcctgctggcgccgacttcgaccgatgcccgcatcgaggccgtggcgcgcgtggccagcggctacctgtactacgtgtcgctcaagggcgtgaccggctcggccgcgatcgacctggacagcgtggcggcgcgcctgccgctgatcaagcagcatgcaaacctgccggtgggcgtgggcttcggcatccgcgacgcgccgaccgcgcgcgcgatcggcagcgtggccgatgccgtggtgatcggcagccgcctggtgcagctgctggaggacaccccgcgcgaacaggcggtggcgacgctgcaggcgtttatcgccgagatccgccaggcgctggatagttgaagtgatctaatgtcggcctgatgatcatttttaagtgcttcaatgtgcgcaaatcgcgcgttgcgcttcgaggtcaccgggccggcatggtaaattcgcgggttgattccctgccatctgccaacaggcgtcccgacaccgggcttgccggcggaccgcagtcatccgaaaggagctttcatgagctggttggataaactcctgccccccaagattcaacagaccgaccccagcacccgcaagggcatccctgagggattgtgggtcaagtgcccgtcgtgcgagtccaccctgtaccggaccgacgtcgaggccaacctgcacgtctgccccaagtgcgaccaccatatgcgcatcagcgcgcgggcacgcctggacgggctgctggacgccgaaggccgctatgagatcggccaggagatcgtgccggtcgacgccctcaagttcaaggattccaagaagtacccggaccgcatcaaggccgccatggatgacaccggcgagaccgatgccatggtggtgatgggcggtgccatccacaccatcccggtggtggtcagctgcttcgagttcgagttcatgggcggttcgatgggctcggtggtgggtgagcgcttcgtgcgcggcgcgcaggctgcgctggagcagaaggtgccgttcatctgctttaccgccaccggcggcgcgcgcatgcaggaaagcctgctgtcgctgctgcagatggccaagaccacctcgatgctgaaccagctgagcgcggccaagctgccgttcatcagcgtgctgaccgacccgaccatgggcggcgtgtcggccagcttcgccttcctgggcgacgtggtgatcgccgagcccaaggcgctgatcggctttgccggcccgcgcgtgatcgagcagaccgtgcgcgagaagctgcctgaaggcttccagcgctcggagttcctgatccagaagggcgctatcgacatgatcgtcgaccgccgcaagatgcgcgcggaactggcgcagctgctggcgctgctgcagaagcagccggccgacgcggtggcataacaacgtctgcatggcagatcaagggcgcgggtggttgacgcgcctttcgcttttcctggccgccccggtggctatgtcgggccgggtgcaagcccggccttgactttgccgctggctggccaaatctggtagcaacagcttttcctcgcaccccacatgcctgtcttccatacgctccccgaatggcttgcccatctcgaaaccgcccatcccgtgggcatcgacatgggcctggcgcgcatcacgcgcgtgaaggaggccctcgggctgcgcatcgacgccgtggtgttcacggtgggcggcaccaacggcaagggctctacctgcgcgatgctcgagcgcatcctgctggaggccggctacaaggtgggctgccatacctcgccgcacctgatctcgttcaacgagcgcgcccgcatcaatggcgagatcgccaccgatgcgcagctgctgccgcatttcgaggcggtcgagcgcgcgcgcaacagctttgccgacccggtcagcctgacctacttcgagttcaccacgctggcgatcattcatgccttcgccgcggccgggctggacgcgatcatcctggaagtgggcctgggcgggcgcctggacgcggtcaacgtgatcgataccgactgcgccatcgtcaccagcgtcgatatcgaccatacccagtacctgggccatacgcgcgaggagatcggcttcgagaaggccggcatcttccgcccgggcgtgcccgcgatctgcggcgacccgatgccgcccaagtcgctggtggcgcacgccgaggccgtcggcgccgagttgtggctggtggggcgcgactaccatttccacgccgccaagggccaggagcgccagcaatgggactggagcggcggcgggcgcaagcttaacggcctgggctacccggcgctgcgcggcgccaaccagctgctcaacgcggcggcggcgctggccgcgctgcaggccatgcgcccgcgcctgccggtcagcgcacaggaagtgcgcaacggcctggcttttgtcgagctgccgggccgcttccaggtgctgccaggccgcccggccgtgatcctggacgtggcgcacaatccgcatgcggcggccacgctggggcagaacctggagaacatggggttcttccgctacacctacgcggtgttcggcgcgatgcaggacaaggacatcgccggggtgctgcagcacgtggccgataaggtcgaccactggtgcctgtgcgacctgccgaccgagcgcgccgccagggccgcggacctgctcgccaagctggaggcgggcggattccgccccggcccggacgccaccgcggcctgcttctccagccccgaggcggcattccgcgatgccatcgagcgagccaccgagaatgatagaattctggtcttcggatcgttctataccgtcgccggcgtgatggcgtatcgtgccacgcaggctaactgaagcaggcgccccggcgcccgctgacctggcaaccccggcggccttggccgatcaatgagcggcaaacgcaacgagcggccccacaaggccgtatcaccgaaccaatctatgggcctgctttcgctgttttcttcccgcaagggcaacgacccggcacccgagcgtgcgcggcgccagcgcaccgacacgggtgcaggcatcgcctcgtcgcgccgtctggccgatgactatgccgacgatacgctcgaccccgaattcccgcagaagcagcgcgcgcgccgccgcctgatcggcgccgtggtgctgatggtggccgccgtgatcgtgctgccgatcgtgttcgagaccaagccgcggccggtgtccgatgacgtctcggtaaaggtcgcaaacggggtcacgggcgcgcagggggcgcagaagccccgcgtcgagccgcgcaaggccgacccgctgccgcccacgccggcggcgcgcaatgatgccgaggcgctcgacgccggcgaggaaatcgtcagcgcgcccaagcccgcggccgccgcagccgctgcggacaagccggcgcaacgggctgaagccaagcccgaagccaagccgggcagcggcaagtacctgatcctgatcggcgccttctcttccgaagagcgcgccaagggctggctggccaagctcaaggcgagcaaggtcccggcctatgtcgaaaagaaaatgctggccgatggcgagcgcatcctgctgcgtgccggccccttcagcgaccgtgacgccgccgacgccgccgacaagcgtgtgcgcgcggtggggctgacctcgaaggtcgtggaacagtaaggggcaagcacggccggcgcctgtgcccggccgcaagcaatgatgcagccgactttcttcgactatgccgtggtcttcatcctgctggcctcgggcgtgctcggcgtgctgcgcggcctggtgcgcgaggtgctctcgctgatcggctgggtggtggcgttctgggtggcgttccgctatggcgcggtggccgcgggctggatgcctgaatcgatgcctggcggcgagctggcgcgccatgcgctgggtttcgtggtgctgctgatcggcaccgtgctgggcgcctcgctggccggcatggtggtcgggcagctgctggagagcaccgggctcaagcccgccgaccgcgggctgggactgatgttcggcctgctgcgcggcgtgctgctggtgatggtgatggtcacgctggccagcctgaccaaattgccggaagaaccgttctggcgcgacgcggtaagccgcccttatgtgatgcaggccatggaatcggtgaagccatggctgccgccggagctggcgaagtacgtcaagacatgaagccgggcatggtgcccggtcggtagtacgcaggcctttgggtccgggggatttccggaccaggctgcgccccctgattcaaagcctttcctgggagcttggcaatgtgcggtatcgtcggcgtggtttcagccacgcctgtcaaccaattgatttacgacagcctgctgttgttgcaacatcgcggacaggatgctgccggcatcgccaccgccaacggcagtactttccacatgcacaaggccaacggcctggtgcgcgatgtcttccgcacccgcaatatgcgcagcctgcccggcgccgccggtatcggccaggtgcgctatccgaccgctggctcggcatccagcgaggaagaagcgcagccgttctacgtgaacgcgccctatggcgtgatcctggcgcataacggcaacctgaccaactgggagcagctgcgcgaggagatgttccgccgcgaccgccgccacatcaacacgcattcggacaccgaagtgctgctgaacgtgctggccgacgagctgcagcgcgccagcaacggcatggcgctggacccggacaccatcttcacggcggtcagcggcctgcaccgccgcgtacgcggctcgtatgccattgccgcgcagatcgccggctacggcatgctggcggtgcgcgacccgttcggcatccgcccgctgtgcctgggcagcgtcgagacccccaccggcaaggagtggatggtggcatccgagtccgtggcgctggaaggcatcggctacaagctcgagcgcgacgtggcgccgggcgaggccatcttcatcgacctggatggcaagctctacagcaagcagtgcgccgagaacgcggtgctgacgccgtgcattttcgagtacgtctacctggcccgcccggattcgtgcatcgacggcgtgccggtctatgacgcgcgcctgcgcatgggcgactacctggccgagaagatccgccaggaagtgtcagccggcgatgtcgacgtggtcatgccgattcccgattccagccgtccggccgcgatgcaggtggccaaccgcctgggcgtgaactaccgcgaaggcttcttcaagaaccgctacgtcggccgcaccttcatcatgcccggccaggcggtgcgcaagaagtcggtgcgccagaagctcaatgccatgggcgtggagttcaagggcaagaacgtgctgatcgtcgatgactcgatcgtgcgcggcaccacctcgttcgagatcgtgcagatggcgcgcgatgccggcgccaacaaggtgatcttcgcctcggccgcgccgccggtgaagtaccccaacgtgtatggcatcgacatgccgacccgcagcgagctggtggcccataaccgcacccacgaagagattgcgaagatcatcggcgcggacaagctggtgtaccaggacgtggaagcgatgaagcaggccgtgcgcgacatcaacccggcgctgaaggacttcgatgcttcgtgcttcgatggccgctacatcaccggcgatatcgacgaggcctacctgaaccgcctggaaacggcgcgcagccaggccgaccgcgacggcaccaatggcgacaccgagcgctcgcaactgcacctgcagcgctccggcggcaacgagtaagccgtgccgccgctgtccgcgcgttgacgaatgcggagcccggccgtaacatggccgggcgtcgatttgatagtcagcttgcggacgcgggtccagcccgaaacagctaaagagatggcggtcagcaacgattcccgatgcgcagtgccttcgcggcgcagcgatttccggaagccggccgccacagcctgaagccgaaggccattcgcagaacagcaagcccgtcgatccgaccacccgatcgcacgggcttttttcatggccgcgcgccggtccacctggccggcgccggctcgtcgaaaccatcgcattcgcgcgggtacgaccgcgctccaccagcatgaacgaaccgctcaaccccgaatcgctcggcatcgacaccctcggcgtgcgcgccggcacgctgcgcagcgaattcatggagcactccgaagccatttacctgacctcgagcttctgcttcaacagcgccgccgaggccgccgaacgcttcgccaactcggaagagggcttcacctactcgcgcttcaccaacccgaccgtgtcgatgttccagtcgcgcctggccgcgctggaaggcgcgcaggcctgcatggcgaccgcctcgggcatgagcgcgatcctgtcggtggtgctgtcgtcgatgcaggcgggcgaccacctggtcagctcgcgcgcgatcttcggctcgaccatgacgctgttcggcaatatcttctcgaagttcggcgtcgagaccaccttcgtcgacccgagcgacctgaacgcatggcgcgccgcggtgcgcccgaacaccaagctgctcttcctggaaacgccgtcgaacccgctgaccgaagtggccgatatcgccgccgtggccgacatcgcccacgacgccggcgcgctgctggtggtcgacaactgcttctgttcgccggcgctgcagcagccgatgaagttcggcgccgacatcgtggtgcattcggccaccaagcatatcgacggccagggccgcgtgctgggcggcgcggtgctgggctcgcacgacttcatcatgggcaaggtgttcccgttcgttcgcaccgcgggcccgacgctgtcggcgttcaacgcctgggtgctgctcaagggcatggagacgctggcgatccgcatggaacgccattcggccagcgcgctggcgctggcgcagttcctggaatcgcatccggcggtggcgcgcgtgttccacccggcgctgaagtcgcacccgcagcacgagatcgccatgcgccagcaaagcggcggcggcgcgatcgtgtcgttcgagctgaagggcgccacgcccgagcagcagcgggccaatgcctggcgcgtgatcgacaacacccggctgtgctcgatcaccggcaacctgggcgacacccgcaccaccatcacgcacccgtacaccaccacgcacgcgcgcgtgagccccgaggccaaggcggccgcgggcgtcggcgaagggctgatccggctggcggtggggctggagtcggtcgatgacctgaaggccgacctgctgcgcggcctgggcgactgagggcttactgcgccggctgtggcggctgtgcaggttgtggcgacgggggcggcgcgggttcgtcgctgccggccacggccttcacgcctgcggccgtgacgtcgtaggtggtgctgaccgcggttgtcgccacgctgacggcggccgatccgacggtagccaccgtcgacaccgcggcactacccacggccatcaccatgcacccggccagtgacgccgtggcgcatgcggccgccagcgccaggacggtgcgctgcaaggtggcggaatctccgctatcgttgcgcacgttgcgacgcaatccgagaaatcgatatggcatggacactgctggccctggcagggctgttcgaggtggtgtgggcgatcgggctgaagtacaccgaaggttttacgcggctggtgcccagcgtcatcacgctgatcggcatggccatcagcgtgctgctgctggcgctggcgctgcggcatatcccggtcgggaccggctatgctgtctggaccgggattggcgcggtcggcaccgcgatcctcggcatcatactcttcaatgagcccgccactgcggcgcggctggcctgcatcggcctgatcgtgtgcgggattgccgggctcaagctcgtgggcagcgcctgaggcccggcatgcggcagtcttagcgcagcagccggcggcgcagcagcatcaggcacactaccagcgccaccattgcataggcgcccagtaccgccaggtgcaggccgacatcctccgacggacggcccagcatcagcggccggatcagcgccaccgcatgcgccagcggcagtaccttggtggctgcctgcacgccctcgggcaactgttccagcgggaagaacacgcccgacagcagcagcatcggcgtcatcaccagggtctggtagaacatgaagaagtcgtagctgggcgccagcgcggtgacagtcatcgccagcgcggcaaaggcaatgccggccagcacgatcaccggcagcgccagcagcgcgccgggcatctgcgcatagccgagcgcacccgccaccagcatgatggccagcccggacagtaccgccttgctggccgcccaggcgatctcgcccagcaccacgtcgcccagcgtcagcggggcatgcatgatcgcctcccaggtgcgctgcacgtgcatgcgcgagaacgccgaatacatcgactcgaagctggccgacatcatcacgctggacgcggtggtgccggcggccaggaaggcgatatacgacaccccgttgacctggcccaccatcagccccagcccgaggccgaggccgaacaggtaaatcatcgggtcggcgaggttgccgatcatcgacgggatggccagcttcttccacaccatgtagttgcggtaccagaccatcatccagttgcgcaggttgcgcggcagcagcggctgcggatagcgctggcgcggcgtcgcggcggcgtggccgccagcggccgcgggggcagtggtggtatccgcgcggggatcctgttcgctcatgtcagtccctcggttcagtcccgcatctcgcggccggtcagcttgaggaacacgtcctccaggttggccgggcggtgcaggtagcgcacgccgttcctgccgtgcagcgccgccagcagcggggcgggctcgcgcacatagcagaacagcgtctcgccgctcatttcagtacgttgcgccagcggcgtcaggctgccgcgcagcgtgtccagttcatcgccatagacctcgaccacgtcgcagccgatctggctgtcgatcagctcgtgcggcttgccttcggcaatcttgcggccgccgtcgatcacgcacaggtagttgcacagccgttcggcctcttccatgaagtgcgtggtcagcaggatggtcttgccgctggccatcagcgacttcaggcgctcccagatcaggtggcgcgcctgcgggtccaggccggtggtgggctcgtccatcaccagcaggtcagggtcgttgatcagcgcgcgtgccaccgtcaggcgccggcgcatgccgccggagaggtcgcgcacctgcgcatcggcgcggttttccagccgggcgaattccagcagcatcggcacgcgccgctcgatctcggccgacgacagtccgaagtagcgcccgaagatgcgcaggttctcgatcaccgagaaatccgggtcgaggttgtcgaactgcggcaccacgcccacgcgcatgcgcgcctgcggcgcgcgctcggggatgggctcgccgcacagcgtgagcgtgccggccatgggcgtggtcaggcccagcagcaggcgcagcgtggtggtcttgccggcgccgttgggccccagcaggccgaagcactggccgcgaaatacctggagatcgaggtcgtcgaccacgaccgtgtcgccgtattgcttgcgcaccttgcgcaactctaggatggcagtcaaggcagggtccggtgtggcgccgcacgggcgcaatatccgccattatgccggtcatcggcgcaatgctcaggtggcgcagtgcagcaaaagccgcggcggcaaggcgcagcgggggccggcctgggcgcgaggcataaaaaaaccgccagcgaactggcggtttttttatgcccggcggtgccaggcggcgaagcgtaccggatcagtacatcttcttcggcagcatctgcatgcgcaggcgcttgcgcagacgcgcttcggcggccttcttcttgcgcttgcgctcggtcgtcggcttctcgtaagcggtgcggctcttgagttcaacgatcaggccagtctgcagaatggcgcgacggaagcgccgcattgcaacttcaacgggctcaccgggtttcaagacgatcttagtcaattcagtcctttaggggattgccgcaaggagcggctggttcacacggggggaaactgcggtcgccggagcgactggtattgcacgccgggctaatgccctggtgcgcccccgcgaacctgaaagatgtggacgtttcagtccgtgcaaccagtgtcaggggtgatagcgccaggtcctatacaactggagcctgacagtaccggtttccatgaatgctatacgcccgtaactatggcatgtatacgactgcactgtcaagaatgtagtgcaatgcgcgcgcgggcgtagcgatcggaaatcgccgctagtctaccttggcgcactttacgccggcgcctgcgtggcacaatctggctgcgctcccgccgctgcgaggcaagcgcgaccaccatgcctgagccgcgccaacccgacgatccccgccccgaccccgaccacctgctgcagcgcatgcaggccgccggcgaacgcgccgcgcgcgggtgcctgcgcatctatttcggcgcttcggccggcgtcggcaagaccttcgccatgctggccgcggcgcgcgcgcagcgcgagcagggcggcgacgtggtggtgggcgtggtcgaaacccatggccgcgccgaaaccgaggcgctggccgaaggcatcgagcgcgtgccattgcgccgcgtcgactaccgcggccgcacgctgcaggaattcgatctcgatgcggccctggcacgccggcctgcgctgatcctggtggatgagctggcgcacagcaacgcgcccggcagccgccaccccaagcgctggcaggacatcgccgaactgctgtcggccggcatcgatgtctggaccacggtcaacgtccagcacctggacagcctgaaccaggcggtggccggcatcaccggcatccgcgtgcgcgagaccgtgcccgacacggtcttcgacgatgccggcgaggtggtgctggtcgacctgcccgccgacgagctgctgcgccgcctgcgcgaagggcgcgtgtacgtgcccgagcaggcccgccatgccgtgcagcatttcttccgcaagggcaacctgattgcgctgcgcgagctggcgctgcgccgcactgccgaccgcgtcgacgacgacgtgcgcgcctaccggcaggaagcctcgatcgaaccggtctggcgcacgcgtgaagcggtgctggcctgtgtcggccacggcagcgatgctgcgcaggtggtgcgcagcgcgcgccggctggccgggcagctcgattgcgactgccatgtggtgacggtgtcggtgccgcgcctggcacccgtgcccgacgcccagcgcgagcagctcgaccaggccatgcggttggccgaggcgctgggcgcgcgtaccgaaacgctggccggcagcgacatggtggcggcggtggccggctatgtgcggcggcacaatctgaccaaggtcttgatcggccgcacgccggcgcgctgggccgatggcggggcttcattgtccggccgcatgcacgcgctgctggcgcgcgcgctggcgccatggctgggcgcgcgcgcgtggctgttcgggcgcaccagttttgccgatgcgctggctgcggcgtgtcccgagatcgacgtgatccgcgtggcggacgacagcgtccgacaggagacccccgctgatgcgcccgtgctgcccggcaccgagccgccgcaggcagacgcccggcctgcgcagtggccgggcctgctgtgggcggtggcctggtgcgccggcgccaccgcgctgtcggcgctggcgcggccatggttcgacctggtcaatatcgccatgctgttcctgctggcggtggccggcgtggcgctgcgccacggacgtaccgcgggggcgttcgccgcgctggtggcggtgggggcgtttgatttcttcttcgtgccgccgcagctgtcgtttgcggtcaccgacgtgcaatacctggtgaccttcctggtgatgctggcagtcgggctggtgattggacagctgacggccggactgcgcgagcaggcccaggtatcggtgcagcgcgagaccgatgcgcgcacgctgtacgagctggcgcgcgagctgtcggcggcgctgaccgacgcgcagatcgtcggtatcggcagccgcttcctgcgcgcggcgttcgatgcgcgtgccgcgtttttcctggtcggcgcggacggccggctgctgcccgcggccacggctcccgaggccggcggcgcggcacagagcgatgccgtcgaccacgtgctggcgcaatgggtcttcaaccacggccagccggccggcaccggcaccgacacgctgccttccggcacggtgctgtacctgccgctgaaggcgccgatgcaggtgcgcggcgtgctggcagtggagccgcgcacctggcgcgcatttgctcagcccgcgctgcggcgccaggtcgatgtctttgccacgctgatcgcgattgcgatcgagcggctgcactatgtcgaggtggcgcagcaggcgctgctggcgatggagtccgagcgcctgcgcagctcgctgctggcggcggtgtctcacgacctgcgcacgccgctgaccagcctgatcggcatggccgagaccctgcagcgcggcacgacgccgctggcgccggaggtggccgagaccgtcggcgccatgcgcgaccaggcgcgccgcatgcacgcgatggtggccaacctgctcgacatggcgcggctgcaaagccgcagtgtggcgctgcgcaaggaatggcagtcgttcgaagaactggccggcgcggcgctggcgtcgctgcgcgatgcgctggcgcggcaccgcgtggtggtggccgacctgtcggcactgccgctggtggaatgcgatggcgtgctgatggagcgcgtgctgtgcaacctgctggagaatgcggccaagtacaccgcgccgggtaccgagatccgcgtgcgcggcgagctctccgacgacgccgtgcacctcgtcgtcgaggacgacggccccggcgtgccggcggcgatggcgcggcaggtgttcgagaaattcacccgcggcgagcgcgagtccgccaccaccggggtgggcctggggctggccgtgtgcgaggccatcgtgcaggcgcacggcggcagcatccgcgtcgagccggtgcatgctcgggcgcagggcgaaggcaccggcgcgcgcttcgtggtcacgctgccgcgcggcaaccctccagtgctggaactggaagcggccggcttgccggcctgaacccgacaacctttcaaggatctgacgcgttatgccattcgagttttcgcccacggtgctgctggtggaagacgagccccatatccgccgcttcgtgcgcgcggcgctgcaggacgagggctgcaccgtgcacgaggccgaatcgctgcagcgcggactgatcgaggccggcacgcgccagccggacctggtgatcctggacctggggctgcccgatggcgacggcgtatcgatgatcggcgacctgcgcacctggaccgaagtgccggtgctggtgctgtcggcgcgcaccggcgaggccgagaagatccgcgcgctcgacgccggcgccgacgactacctgaccaagcccttcggcgtgggcgagctggtggcgcgcctgcgcgtgctgcagcgccgccatgtgcgtgccggcgcgcaggggcgggcgcaggtggcgttcggcgagatcgccgtggacctggccaaccgccaggtcacgcgcgcgggggagccggtgcacctgacgccgatcgagttccggctgctggcggtgctgctggcgcatcgcggcaaggtcatgacccaccgcgaactgctgcgcgaggtgtgggggccgtcgcatgccgacagcagccagtacctgcgcgtctacatggggcacctgcggcacaagctggaagccgacccggcccggcctgcctacctgctgaccgagatcggcgtgggctaccgcttcgccggctgagcgccgggtcactcccacaacactttcttgccgatcacgcgccgcgtgaggctggcgctcgccccttgcactcccggtaaacccgcagcgatgtcgaaattgtttgacggataaattcaaggtaataaactgttattcatagatatgaattaaggcaggagcaccgcatgcaggaccaacccgtctatttcatctcgaccgacgaggtcgagggctaccaccccgccaaccatgtcggcaccctcaatcgccggctgatcggcccagagaccgtcggatcgcggcatctggaagtgatccacggcaccatcgagaagggcaagggcgcgctgccgcacgcgcatcccggcatcgagcaggtctgctacgtgctggaaggccgcgccgtggccgaggtcggcggccagcgaaaggaactgggccctggcgactgctgcttcttcccgccggaccagatgcatgtgttcaccgtggtcagcgacgagccggccaagattctggtcatctattccccgccatatgaggaatcccccgagcgcgtgatacggcccgcataagacgcggctggtcacggcaagggattgaacaactacaggagacaactaccgtgaagtccttcagcaatgcctttgccagcctggtgctcgggtgcaccgcggcgctggccgccaccccggcgctgtcggccgatgaattcccgtccaggccgctgcgcctggtggtgccgttcgctgccggcagcggcaccgatgccgtggcccgcctgactgccaaatacctgggcgaggcgctgcagcagccggtggtggtggacaacaagcccggcgccaacggcaccattgccgccgagttcgtggccaaggccccggccgatggctacacgctgttcatgaccaccaacaccacgcattcggccaacccgtcgctgatgaagcagctgcgctatgacccggtcaaggatttcacgccggtctcgcgcatgggcaacctgccgttcatgctggtggtcaacccggcgctgccggtgaagacgctgcgcgagttcatcgactatgccagggcgcatccgggcctgagctatgccagcggcaacagcaccggcatcgtctcgggcgccacgctgtcgaagatggccgggctgaacatgctgcacgtgccatacaagagcacgccgccggcgatgaccgatgtgatgggtggccaggtgcaggcgatgttcgtcgactttgccgcaggcatcgccaacgtgcgcgccggcaagctgcgcgcgctggcggtgaccaccgcgcagcgcagcgagctgctgcccgacctgccgccgctggcgagcgtgccggagctgaagggtttcgacgtgacctcatggaacggcgtgttcgcgccggccggggtgccggcgccggtggtgcagcggctcaatcgtgaactggttgccatcgccaccagcaagcagcatgcgccgcggttccacgcgctgggcttcgagccgttcggcagcacgccggccgagctcagccagtttgtcgtggccgagctgcagaagtggtcgcggctggtgaaagacgctggcatccagccggaataggcgctcttcgggcaaccatcagacaaccaacaagacaacgacatcaggcaggtaacgctatgaatttcgacctctccgaagaacaggcatccatcgtcgaggccgtgcagcaggtctgcacgcagttcgacatggagtactgggatcgcctggacaagtccggcacctatccgcacgagttctacaagacgctgtgcgaaggcggctggctgggcgtggcgatgcccgaggccttcggtggcgcgggcctgggcatcctggaagcggcgctggtgatgcagaccatctcgcagtcgggcgctggcatgaccggcgcctcggcagtgcatatgaatgtgttcggcctgaacccggtggtggtgttcggcaccgacgaacagaagggccgctttctgccgccgctgatcgccggccaggagaaggcctgcttcggcgtgaccgagcccgacgcgggcctggacaccaccaagctcaagacctttgcgcgcaaggtgccgggcggctattcggtgagcgggcgcaagatctggatctcgacagcgcaggtggccgaccgcatgctgctgctggcgcgcaccacgccgctggagtcggtgaagaagtcgaccgaagggctgtcgctgttctacaccaaagtcgaccgcagcaagatcgagatccgcgagatcgacaagatgggccgcgccgccgtcgataccaacatgctgtttatcgacgacctgttcatcccggaggaagaccgcatcggcgaagagggcaggggctttgagtacatcctgcacggacttaacccggagcgcatcctgatcgcggcggaggccatcggcctgggccgcgcggcgctggccattgccacgcagtacgccaaggagcgcgtggtgttcggccgccccatcggcatgaaccagggcgtgcagcatccgctggcgcaggcctggatgcagctggagtcggccaacctgatgatgctcaaggccgccgcgcgctatgacgccgggcagtcctgcggcgccgaggccaacacggcaaagtacctcgccgccgaggccggccataacgcgtgccagaccgcgatcctgacgctgggcggcatgggctactcgcgcgagtaccgcgtcgagcggctgctgcgcgagtcctatatcccgcgcatcgcgccggtcagcccgcagctgatcatgtgctttatcgccgagcgcgtgctgggtttgcccaagtcgtactgagagggagcgacgatgccagacgagcaagcgcaggcgagcgcggccaccgggccgctggccggcatccgcgtgatcgacatgaccgcggtcgcgatggggccgtatgccacccagatcctcggcgacatgggggctgaagtcatcaaggtcgagccgcccgccggcgatgtgttccgccacgccgagccggcgcggcacgcggccatgggcgccagcttcctgaacctgaaccgcaacaagcagttcgtggtgctggacgtgaagcagcccgatgacctcgccgcgctgaaagccctgatcgccacggccgatgtctttgtctccaacgtgcggccgcagtcgctgcgcaagcttgggctggactatgcgtcgctgcgcgcggaccatccgcggctgatctactgcggcgcttatggctattcggaagagggtccctacgcgggcgcgccggccttcgacgacatcatccaggcgcgcagcggcatggcgcagttccagggtgcgaactcgaacgaaggcccgcagtacgtcaacaccatcctggccgacaaggtggccgggctgaccgtggcctacgcgatcccgatggcgctgtacgagcgcgagcgttccggccagggccaggccatcgaggtgccgatgttcgagacgctggtgtccttcctggccaccgagcaattggccgggcagaccttcatcccgccgctcgggcaggccggctatccgcgcgtgatgtcggcgcaccgcaagccctatcgcacgcgcgacggccatattgcgctgctgccctatacaagcgcccaatggctgcgttttttcgatgtgtcaggccatgcggagctggcgcaggatcggcgctatgccaccccggccgcgcgcagcgccaatatcgacgcgctctacgccacactggccgagatcgtcgcgcagcgcagcactgcggaatggctcgacctgctgcgtgatgccgatatcccgcacagcgaagtgccgcatttcgagagcctggccgacgacccgcacctgcgcgccaccggcatgatgttcgaatacgaccatcccagcgaaggccggctgcgtggcgtgggcatcccgacgcgcttctcgcgcacgcccggcaatatccgcagctggccgcaggcgttgcccgggccaggcggcgcggagggcggctgacacccttgccggccgactccgccgcgtacaatcccggccaacagatattgaagtcgaggaagccaacgatggcagaacaggaaccggcagaaaaatcgggtcacgccagcgtcaagaccgcgctgcgcgtgattgagatcatggagatctatgcgcgcgaagggcgctcgctgacgctgaccgagctggccaggctgctgggcgcgccgatgtcgagctgcctggggctgatccgcacactggcctcgctcggctacctgtacgagaccggccgccgccagggctactacccgacgcgccggctgctcgacattgcccagcgcatcgcccgcaacgacccgctgctcgaacgcgtgcagccggtgctggaatcgctgcgcgacaccaccggcgaaaccgtgatcttcggcaagcttcaggatgacggccgcgtgctgtacctggaggtgcgggagtccggcaatccggtgcgctatatcgccgcgccgggcgagctgcgcgatgcgcacgtgaactcgatcggccgcgccatccttggcacgatgccggcggacagccgcgccgaactgctggccggcgtgtcgtttgcctcgcgcacggggcgcacggtggactcgctgcgcgttttcgaagccgccatgcagcaatggcaggcgcaaggctggtatccgaactttggcgagtcgtttcctgatctcggcgcgatcgccttcccggtggccatcgggggcgtgacctatggcatgtccgtggcggggccgctgcatcggatcgaggccaatgccgacgccattgtcgtggcgctgaaggccgctggcggttcgctgcagggataagtgggagagggcaggcgttgcggcggcccgcaggctgtcgtgacggctgtcgaggccggacaagatcgaagcgcgttgcgcgaaccgaagcccaaaacgaaaaagcccggtgcgtttgcaccgggcttccgtatcggttggctccccgacctgggctcgaaccagggacctgcggattaacagtccgtcgctctaccgactgagctatcggggaacagctgagagagaaattatagccagtttctcttttcttcgtcaacaccttttcgacattttgttcttgtcagaaggtgtctgaaagcttccggcttgctgcctgccgtacggtgcgaagggcatctctgctggcttcgtgccgtcgtgtcgaacagcgaggccgcattatagctatggtttttggtttgtgccagaaaaaaaccgcctcgcggcggtttttttctgcggcactcgcccggctcagtcgaacaccggcgaatccacgccgaggatcttgtgcagcttcggcgaggtggtggtgtactgcatgtggattttcttctcggggaagatatacggcgcggcaccgaacgcggccagcgcggcctcgtggaagcccgacaggatcagcttcttcttgccggggtaggtattgatgtcgcccaccgcgaagatgcccgggatattggtctcgaacttctcggtgtccaccttgatctgcttgcgctccaggtccaggccccactcggcgatcgggccgagcttgggcgacaggccgaagaacaccagcaggtcatccaccggcaggcggcgggtcacgccgtcggcgccggtcaccttgatctcggtgagcacgccgtccttctcttcatagccgccgacctggccgaccaggaactgcatttccatttgctcgcacagttccttcatcttggcgaccgaggccggcgcggcgcggaagccgtcgcggcggtggatcatcaccaccgactcggccttgccgaccaggtccagcgtccagtccagcgccgagtcaccgccgccgatgatcaccaggttgcggccatggaagcggctcgggtccttgacgcggtagaacagctgcttgccgtcgaacttgtcgatgccctcgaccttcagcgtgcgcggctggaacgaacccacgccggcggcgataaagatggtcttggtgatgaagcgggttccgagcgaggtctcgacgaagaagcggccgtcctcgcggcgctccacgacggcgacttcctgacccaggtggaaggtgggctcgaacggctcgatctgcttgagcaggttgtcggtcagttcctggccggtgcagatgggcaccgccgggatgtcgtagatgggcttgtccggatagagctccacgcactggccgccgaccaccttcagggaatcgatgacatgtgccttgatttcgagcaggcccagttcaaagacctggaacaggcccaccgggccggcaccgacgatcagcgcatcgatctcctgcggctggccgcctgcagggctgccgccgtcgacctgcttggtcgtgtcggcgacgggatttggaatgctcaagtccatattcgtcctgatacgtttgcatgggccgcttgtgcccggtgttgcggaaagcgcgtggggacggctttcttgttctgtcagcgctgcaggtactgcagcttgtcagtggcgtccttccattcctcggcctcggccagcggggccttggtcttggtgatggagggccagttgcgggccagctcggcgttcaggttgatgaactgctgctggtcgcccggcacgtcttcctcggcgtaaatggcgttcaccgggcattcggccacgcacacggcgcagtcgatgcactcatccgggtcgatagccaggaagttggggccttcgcggaaacaatcgaccggacacacgtcaacgcagtctgtgtagcggcaacggatgcaggattcggtgacaacgtgagtcatttcggttccaggaaaacaggtcggcttttaatgggaaactgtggggccgcttcttgccggcggacgccgcatccaccgcatggtgccgcatggcagcatgggctgggcgagcgccggccgaggcctttcggaaagcgatattgtagccgaggcttctggcaagaatagcgggtctatatagccggatcagatagttttcttatttctttatgtacttttgatttaacgcatggcggcctgctggcatgtcggcccgccagcgggcatgatgaggccgccaacagtcacttgcatccgtgccgggagacccgtatgccacgccagccttgccttgccagcctgcggcacgatgccgcgatgcgccggatcttcgcacccattgttgtgctgctgacggcatttctggcgccgatcgggtcggttgccgcccagaccctggcccagtcgccgggcatggccgacagcgtggtatcgcgcctggtggcgtggcgcgcgcgcaccgatgcgccggtcgcgctgccggcgctgaccgcgttcgagtgggaccacttcagcgtgaccgattcgcccgcgggcgacgccatcgcccattgcggccgggccggcctgatgccgtgcgggccgcagttgcagccgcagccgggcgaccgggtccaggtgttgcgcttcgagcgcgccgggacccaggtctacaccgagcgcatcatggccggcgacggcgcctttgccgagccgctgccgcagcgggtgccgcgcgccgccgccacgctggtgtcgtgccccgctaccgacggccgccagttgtggtgcctgcagggcaaggcccggggcagggaggcgccgcggcagccacagcccttcctcgatggtggttgagcggcaagagtggccgggtgcggccagacttcggttagcatgacgtactgacccggcatcgccgtctggcccgctatgatcatcccgtccctgctcgacaccgacctgtacaaattcacgatgatgcaggtggtgctgcatcagttcccgcaggcgcaagtggaataccgcttcaagtgccgcaacgcgggcgtcgacctgacgccctatatcgatgagatccgcgccgaggtggcacacctgtgccagttgcgcttcaccgacgacgagctcgcctacctgcgcgggctgcgctttatcaagagcgatttcgtcgacttcctcggcctgttccacctgaacgagaaatatgtctcggtgcggccgtccccgcagggcaatggcgagatcgagatctcgatcatcggcccgtggctgcataccatcctgttcgaagtgccggtcctggcgatcgtcaacgaggtctatttccgccgcacccagcccaggcccgacctggccgaaggccgccgccggctggaccagaagctggccttgctgaagacacccgagctggccgattgcgtgatcgccgactacggcacgcgccggcgcttttcgcgcgaatggcaggaagaggtgctgctgaccatgcggcgcctgctcgggccgcagctggccggcaccagcaacgtccactttgcccgtctgcacaatatggtgccgctgggcacgatggcgcatgaatacctgcaggcctgccaggcgctgggcccgcggctgcgcgattcgcaggtgtacgcactggagcgctgggcgcgcgagtaccgcggtgacctgggcatcgcgctgtcggatacctacggcttcgatgccttcctgcgcgacttcgacctgtatttctgcaagctcttcgatggcgtgcgccatgattccggcgacccgatgctgtggggcgagcgcatggtcgcccactatgccgccaaccgcgtcgacccgcgcaccaagacgctgatcttcagcgacagcctcgacatcccgcgcgtgatcgaactgtacgagcgcttccatggccgctgccggctcgcctttggcgtcggcaccaacctgaccaacgacctcggctataccccgctgcagatcgtgatcaagatggtgcgctgcaacgggcagccggtggccaagctgtcggacacgccggaaaagaccatgtgcgacgatcccggctacctgtcctacctgcgccaggtgtactcggttcagcccgcggcgtagcaaaattcaacaccttgcgccggccatcgcatgctctgcatgcggcgggcgccactataatcggcgcatcgcgcgttcgccgcgctttgcgcttctccagccaggccttatggaaaccaacgacgcccgcgaccgcatctttgcccgcatccgtgctgcccagggcaggccgacccggccgagcgcgggcgagcgcgaggccgtggccgactacctggcgcgtcacccgcagggcccgcgcccggcggtggccgtcgacctggccgaggccttcctggcgcaggcccagcgcatggcctcgaccgtcgaccgcgtggcgaggatggacgaggtgcccgccgccaccgtgcgctttctggacaacctgaacctggtccaccgtgccgtggcgtgggacgcgctgggcccgctgccgtggcaggccgcggggctggcggtggaatgccgcccgccggtgcgcgaggtcgaggccgaccacgatcatggcgacctggtcggcatcactggctgcttctgcgcgattgccgagaccggctcgctgatgctgctgtcgggcccggccacctttgcctcggccgcgctgctgcccgagacccacgtggcggtagtgccgcgctcgcgcatcgtcgccggcctggaagacgcctttgcgctggtgcgcagcgagcgcggcgaactgccgcgcgccaccaatatcatcagcgggccttcgcgcacgggcgatatcgagcagaccatcgtgctcggcgcccatggcccgtaccgcgtgcatgtgatcctggtcgacgaggcctgaacccgcggcttttgccgcacggaatgcgatgcaccacccatgccggaagccccggggcaagaggtgcttgaattacacttgcaggcttgcctgcgtgccgcggcttcgtgccggcggtgcgccaatgaatgctgcattcccgaggagatcctgcctgatgcgacgtgcctccgtgctgttgccgctgctggccgtgctggccgcatttcccgccgccggccatgccgcggaccttgacggggcgtcgctgtccccgctgtgggggctgccgttcgccggcatcctgctgtcgatcgcggtgtggccgctggttgcgcccaagttctggcaccaccactacggcaagatcgccgcgggctgggggctgctgttcctgctgccgttcgcggcagcgttcggcacgcatgcggccgcggccagcgcggggcacgcgctgctggccgagtacatcccgttcatcgttctgatcgcctcgctgtatatcgtggccggcggcatctgcgtgcgcggcaacctgcacggcacgcccgggctcaataccggcatcctggcgctgggcacgctgctggccagcttcatgggcaccaccggcgcggccatgctgctgatccggccgctgctgcgcgccaatgacaaccgccgccacgtggcgcacgtggtggtgttctttatcttcctggtggccaatgccggtggctcgctgacgccgctgggcgatccgccgctgttcctgggcttcctgaaaggcgtggacttcttctggaccatgcgcaacatcttcccggagacggtctttatctgcgtggtgctgctggtgctgttctacctggtcgaccgtcactactaccagaacaaggaagaggagctgccaccgcgcagcgaccccacgccggactcgggcggcatcgccatcgagggcaagttcaacttcgtgctgctgctggccgtgatcggcctggtgctgatgagcgggctgtggcagccgggcatcgcattcgacgtcctgggcaccgaggtgccgctgcaggccgcggtgcgcgatgcgctgctggtggtggtggcggtggtgtcgctgctggtgacgccgcaggcggcgcgtgccggcaatgaattcaactgggagccgatcctggaagtcggcaagctctttgccggcatcttcctcaccatcatcccggtcattgccatgctcaaggccggcaccgacggcgctttctccggggtgatccgcgcggtcagcgacagcaacggccagccggtcgacggcatgtacttctgggccaccggcctgctgtcctcgttcctggacaacgcgccgacctacctggtgttcttcaacaccgccggtggcgacgcggccacgctgatgacgcgcgatgcctcgacgctggccgcgatctcggccggggccgtgttcatgggcgccaatacctatatcggcaatgcccccaacctgatggtcaaggccattgccgagaaccgcggcgtgcgcatgccgagcttcttcggctacatgctgtactcgggcaccttcctggtgccgctgtttgtcatcatgaccttcctcttcttccacgtttgatgccatgaagccgtctgttcttgtcacccgcgccatctatcccgaagtcatcgcgcacctggcgcagtacttcgatgtcgacgacaaccagcaggacgcggtgctggatgccgccgcactgaaggcgcgcctggcgggcaaggccggcgtgctggccaacgccgccgaccgcatcgacggcgacgtggtcgccgggctgccggcgctgcgcgcggtgtgcaacatggcggtcggctacaacaacctggacgtgccggcgctgacggccgccggcatcgtcgccaccaatacgccggacgtgctgaccgagaccaccgccgacttcggctgggccctgctgatggccaccgcgcgccgcgtgaccgaggccgagcactacctgcgtgccggcaagtggcagcgctggagctatgacatgctggtaggcatggacctgtacggcagcacgctcggcatcctcggcatgggccgcatcgggcaggcgctggcgcgccgcgcgagcgggtttggcatgagcgtgctgtaccacaaccgcagccagctgccggcggacaccgagcgcgcgctgagcgcgcgctatgtcagcaaggaagacctgctgcgccagtccgaccacctgctgctggtgctgccctatggcccgcagagccaccacgccatcggcgcggccgagctggcgctgatgaagccgaccgcgacgctggtgaacctggcgcgcggcggcatcgtcgacgatgccgcgctggcgcaggcgctgcgcgacaagcgcatcttcggcgccggcctggatgtgttcgagggcgagcccagcgtcaatccggacctgctgacggtgcccaacgtcgtgctcacgccgcatatcgccagcgcctccgagaagacccgccgtgcgatggcgatgctggccgccgacaacctgatcgccgcgctcgaccagggcccgcaggccggccatccacccaccgtgatcaaccccgacgtcatgtcgcggcgccgctaagcctgccatttacctgtttcctgctgcatgaccctgattccgttcctgacgctggccgtggcgctgctcgcggtcgtcctgctggtcatcgtcctgctgcgccagcaggctgcctcgccgggggccgagcttggccggcaactggccgacatgcgcgcggaaagcgcgcgcggcatggagcggctggagcgggagttgcgcaccgacgtggccgacgccgcgcgcggcagccgcgacgagtcggcccagcagatgctgcgcttccagcaggcgctgtcgtcgcagctgacgggcatcgccacgctgcagaacaaccagatcgacaccttcgcgcagcaactggccaagctgaccgagaccaacacccggcagctcgagcaggtgcgccagcacctgatgctgcagggccagcaggcgcgcgacgagcaggccggcacgctgcgccgcttcggcgacgggctgcagcagcagctggcgcagatgtccgaagccaacgagcggcgcctggccgaagtgcgcgccacgctggagaagaagctgcaggacatcgaggccaacaacgccgccaagctggaggaaatgcgccgcactgtcgacgagaagctgcatgccacgctggagcagcgcctgggcgagtccttccggctggtgtcggagcggctcgagcaggtgcaccgcgggctgggcgagatgcaggtgctggcgcagggcgtgggcgacctgaaaaaggtgctgaccaatgtgaagtcgcgcggcacctggggcgaagtccagctggaaatgctgctggagcagatgctgacgccggagcagtacggcaagaatgtcgagaccgtgcgcaactcgggcgcgcgggtggagttcgcgatccggctgccgggcaaggccgcgggtggcgacaatgcgccggtctggctgccggtcgacgccaagtttcccaaggaacagtacgagcgcctggtggacgcgcaggagcggggcgacccggatggcgtgctcgcttttggccgcgaactggaagtggcgctgcggcgcgaggcccagaccatcgccgagaaatacctgtcgccgccccagaccacggatttcgccatcctgttcctgccgaccgaggggttgtacgccgaggtgctgcggcgcccgggcctgaccgacctgatgcagcgcgactaccgtgtgaccgtggccgggccgaccacgctgaccgcgttgctgaacagcctgcagatgggtttccgcacgctggcgctggaaaagcgctcaagcgaggtgtgggaggtgctgggcgcggtcaagaccgagttcggcaagttcggcgacgtgctggccaagacccgcgatacgctggagcgcgccgcgcgcaatatcgagcaggccgaagtgcgcacgcgccagatggcgcgcaagctgcgcacggtggaagcgctgccgggcgaggccgcgcagcaggtgcttggcctcaatgcggcagcagcggcggacgcgccggaggccgccgaagacaacggcggctgaacgcgcggcagggaagggtcagggcaagcccccgcggggcttgcggattgctgccggcctgggcgccggcgcgctgctcagcgctcgtcttcgggcgccagttcgcgcacgtggacttcaatgccgccgaagcgggcggccacccagttgtaggccttgcaggccagccacagcaggccaaagccgatcagcgcattcaggatgattgcgctgaagaccgtgatggcgggcaggtcaccgtagcggacgaaggtgacaaacaggcccagcgacacgatcggcagcgagaagcacaagtagaccagcaccagcgcgcgggcggtcttgacggggtggaggtaggcgatctcctgattcatgacgggggatactcgaatggttctgaatcgtgcgccaagtgtagcgattggccgatgccaagcatagcccgccggcggcgggggcaggcgaaagccccgtgccggctgtgctatggccgcaaatgtgcggcacaaaaacgacacattgctccggcgtgtggcaagcgcttgcgtgtagcgcctgccggtccggctagaccagtccgtcgaacagcatcacctcgaccgcatcgccggccttgaccgagtcctgttcatgaccgagcacgataaagcagttggcctcgctcatcgagcgcagcacgcccgagccctgctggccggtgatgcgcacttcccactggccgtcgccggcgcgcgccaggatgccgcgctggtactcggtgcggccgggcttcttgcggatggcttgcgcgctgcgcacgcgcagcagcggcagcggtgccacgctggcgcccatcagccgctgcagcgcggcgcgcacgaagtggtagaaggtgaccatcaccgccaccgggttgcccggcaggccgaacaggagcgcgtcgcggccgttggaattgatgcggccgaaggccatcggccggcccgggcgcatcgcgatcttccagaacgtgacatcgcccaggcgcgccatgatctgcttggtgtagtcggcctcgccgaccgagacgccgccggaggtgatgaccgcgtcggcggtctcgcaggcggtgcggaaggcggcttcgagcgcctcggggtcgtcgcgcaccacgcccatgtcgagcaggtcgacgttcatccggcgcagcatgccgtacagcgtgtagcggttggagtcgtagacgcagccgggatcgagcggctcgccgatcgagcgcagctcgtctccggtggagaagaacgccacgcgcaggcgccggcgcacgcgcacctcggccacgcccagcgaagccagcaggcccaggtcggccggctggaggatgcgtccggcctgcagcgcggcctggccgcgcgccagatcttcgccgcgcaggcgccggttgtcgccggtgcgcacgcagtcggcggcaaagcggatgcgcgcgccgtcgtccacggcttccacgaactcctgcggcaccacggtgtcgcagccggccggcatcaccgcgccggtcatgatgcgcaccgcctgcgccgccgtgggcgccagcgcgcgggcgccgccggcgaaggcgctgccgatgacttccagctcgaccgtggcggtctgcgcggctgccagcgcggcaccctggaaggcatagccgtccatcgccgagttgtcatgcgccggcacgtcgatgggcgagacgatgtcctcggccagcacgcggtccagggcgctgcggatcggcaactgctcgacgccgcgcaccggctcgactacctcgccgatgatgcggttggcctggtccaccggcagggcggtggggtcgtagtcggaaaggcaggagatgacggattgcagggtgggcatggtggctcagcgcgtttcgtgcgtgcgcagttcgtccagggtgttgatattggcaaaggccgcggcgtcgtcgaacagcacttcggccaggcggtgcgaggcggcccaggtctcgatcttgcggccgccgccggaaagataagccaccaggctgtcgagcgcactgaccggcatcaggcagaacacaggttgggtctggcgccggccgtcttcgtccagcgtgacggggatcgccaggtccgcgccttcggcctcgatcgcctgcgccaggcgcgccaccaggtcggtcggcaggaacggcgaatcgcaaggggcggtcaccatccacggcgtggcgcattgctccaggccggccagcatccccgccagcggaccggcgaagtcgggcacggtatcggtgtagaccggtacgccgaacgactcataggcggccaggttgcggttggcattgatcatcagcccgcccacctggggggtaagccgcatcatcgtgtgcatggccatcggcgtgccgtgcagcggctgcaggcccttgtcggtgccgcccatgcggctgcccctgccgcctgcgaggatcaggccggtgatgtcgtcgcgtgcaatcatggattttgtgtgcggcggggtcagccgccgatataggacatctcgatcttgcgctcggcacgcctggcgcgcaccgtcgggtcgctgcgctgctcggaataattgtcggtgcggccctgccacacctgcgcaatcgcattggagatttccaggtcgctgtagccgccgcgcagcagcgcgcgcaggtcgaagccctcggtggcgaacaggcacaggtagagccggccttcggtggacagccggatgcggctgcagtcgccgcagaaggcgtgggtgacgctggagatcacgccgacctcgccgctgccgtcgcggtagcgccagcgctcggcggtttcgccggagtagttggcctgcaccggttcgagcgggaattccgcatcgatgcgcttcaccacctcggcggacggcagcacttcatccatctgccagtggttgctggcgcccacgtccatgaactcgataaagcgcaggatgatgccgctattgcggaagtggcgcgccatcggcacgatttcctggtcattggtgccgcgcttgaccaccatgttgaccttgatcggcgccagccccacggcctgcgcggtctcgatgccgtgcagcacgtcggcgacggcgaagtccacgtcgttcatgcggcggaaggtggcgtcgtcgatcgcgtccaggctgacgctgacccgcgtcagccccgcgtcgcgcagcgcgcgcgccttgcgcgccagcagcgaggcgttggtggtgagcgtcaggtccagcggcttgcccgagaccgtctcgatcttcgccagcatctccaccaggtgctcgatattcttgcgcagcagcggctcgccgccggtcaggcggattttctcgacgccgtgggcgacgaacaggcgcgcggtgcgctcgatctcctcgaagctcagcagctcggagtgcggcaggaaggtgtagtccttgtcgaagacttccttcggcatgcagtagacgcagcggaagttgcagcggtccgtcaccgagatgcgcaggtcatgcagcggccggccgcgggtgtcggccaccaggccggtgggggcagccagcttgccgggaatgctgggcgtcatcgagcggtagcgatggtcgcgcaggtcgaaaatcggaatgacggattcggtcatggcctgtgggtgggcacggcgtccggggagcggcctggcggcgtggccaaatcaggggcgctcgagggccggatgccttctgctgccattctagccgaggcgggggtggggcacccgcatcccccggagatggcggggattcatccggccggctgcccatgaaaaaaggagacggcgtggccgtccccttcttgctttggctgcggtgcagcggcaacgcttactgctgcgatgccatctccacttcgcggccaccggtttccaccaggatcatcggaccgtggggcagtggcggcagcgccttgcgctcgcgctgcacgcgcggagcgggcgcaatgcgggcggcggcttcctgggccgaacgcagcttgtcgctgtcggtatggacccattgaaggccggcggtggccagcatcgattccaggttttccagcgctgccggggtggccggcgctgcagcaacgaccggggctgccggggcgaacacttcggccggtgcggcttcggcgacaggggcggcgaccggtgcagcggcaggtgccgccaccaccggagccgcttcgacggccacgcttgcggtggtctcgacgatcgcttcggcggcaatggcttccgtgacggcaacggctaccggcgcagcttgctggggcgcgggctcggcaaccggcgcggtcaccggggctgcctcggcgaccggcgcgggcgtcacatcttccggcacggcgatgcggatcgcttcgacggcctcggccgcagcggccacggccacggcagcttgcggtgcgggctcggccggcacgggggcttcagcacgtaccggggcaacggcttcagcagcggcggcctcttcgtcgccttcgccctgggcaacttgcaccgactcgtcgcgctcgcggcgatagcggttgcggccacggcggttgcggcggcggcgctcttcgccctcagcggtctcggcggtgctttcggcaccttccggcaactcggcgcggacggcttgcgtctcttcggtcacggcctgcggcagcacgcccagagcctgggcggcggcgacggcttccggccgcggtgcttcaccggcttcggcttcgcgcagttcgctgcgttcgcgctggcgttcacgctggcgctcgcggcgttcctggttgcggtcgcggcggccttcctgacggccctcgacgcgctcgccctgggcgcgctcggcttgcaccgcctcgccctggcgtgccagggccggggtggcctggccttcaccttgctggcgcggctggcggccctggcgttcgccacggccctcgcgttgctcgccgcgctcggcaccctggcgttcaccacgttccgcgcgctcggcacggtcgccgcgctggccgcggccctggcgctcgccacgctccgcgcgctcaccacgctcggcgcggtcgccacgctcaccacgcaggccacggccttcgccgcgctggccgcgctcgcgccggccttcggcgctgcgggcctcagtggcaaccgccggcttggccggttccaccaccggcggggttgccggacgggcaccgaacaggcccttcagccaggcgataaaaccgccgctgaccaccggctgggtggccggcacgggcggggcgaccggggcttccggcttgggtgcgcgctcggggcgcggcaccgacaccggggccggttgttccggggtgatgcccttgaccgcggcttcctggcgcggcttggcttcttccttgcggcggctgctgtagctggtgtcggcttccagttccttggcggcggcctcggccatgcggtagctggcggtgctttcttccaggcgcgggtcgtcgtggcgcaggcgctccagcttgtaatgcggcgtttccaggtgcttgttggggatcagcagcacattgaccttgaagcgcagctcgatcaggttgatttcctggcgcttctcgttcagcaggaaggcggccacttccaccggcacctggcagtggatggcggcggtgttttccttcatcgcctcttcctggatgatgcgcagcacctgcagggcggacgattccgtatcgcggatatggccggtgccgttgcagcgcgggcaagtgatgtgcgagccctccgacagcgacggccgcaggcgctggcgcgacagctccatcaggccgaagcggctgatcttgcccatctgcacgcgcgcgcggtcgtggcgcagcgcgtccttcaggcgcgtttccacgtccttctgggccttgcccgactccatgtcgatgaagtcgatcacgatcaggccgcccaggtcgcgcaggcgcagctggcgcgcgatctcgtcggcggcctcgaggttggtgcgcagcgcggtttcctcgatgtcggcgcccttggtggcgcgggccgagttcacgtccacggagaccagcgcctcggtgtggtcgatcacgatggcgccgcccgagggcagcatcaccatgcgcgagtaggccgactcgatctggtgctcgatctggaaacgcgagaagagcggcacgtcgtcccggtacttcttcacgcggttcatgttgtcaggcatcaccacgctcatgaaggcgcgggcctgttcgtagatctcgtcggtgtcgatcaggatctcgccgatatccggctggaagtagtcgcggatggcgcggatgaccaggctcgattccaggtagatcagcagcggggccttgttgtcgccggcggcgccgtcgatggccttccacagctgcagcaggtagttcaggtcccactgcagttcctcggccgagcggccgatgccggcagtccgggcgatgatgctcatgccttccggcacggtcagctgcgccatggtctcgcgcagttcctggcggtcctcgccctcgatgcggcgcgacacgccgccgccgcgcgggttgttgggcatcagcaccaggtagcggccggccagcgagatgaaggtggtcagggccgcgcccttgttgccgcgttcttccttctcgacctggacgatcagttcctggccttcatgcagggcatcctggatgcgcgcgttgcgcacgtcgatgccttccttgaagaaggcgcgggctacttccttgaacggcaggaagccgtggcgctcttcgccgtagttgacgaagcaggcttccagcgagggttcgatgcgggtgatgacacccttgtagatgttgcccttgcgctgttcgcgcccggcagtctcgatgtcgatatcgatcagtttctgaccgtcgacgatggcgacgcgcaattcctcctgttgcgtcgcgttgaacagcatgcgtttcatcgcaatacctcactccagtgtcgcgggtggcaccgtctgggcggtgtccgcggcgatccatggagcacgcgagggagcgagcgaggcgcgagaattgccggaaagcgccgctgcgcgggataggcgagcggctgggcgcgggtgaaagagagcgatgacgtcggggtaacgtccgcggggcaggagagaacaccggaggctgctcttgcgcagacatccggcgcgttcccgtgccggaggcgatgctgaacgccggcgcaaccggcgccggcggcatcgcggccggccgcggaaggcctagacgcgtcaaagagcaaatttttcggacacggcatggttgccgttgctgcctgactactcctggcgggcgcacctactacttcttggaattctgcgaccgggcgccggtatttccagtcaggcggcaggctaacctgccggccggcaccgtttcccggtgcgggcaggacttctctcaccgaagcggatgccggcagtggcatccgcctttaaattctgttttacctgaacactcagttcccacgtcaccgcctgcctcgccgaagcctcctttgggcgacttcctgcatgccggcggcaccgtgcgtgctgctttttactgccatttgcccgtctggcgcttggcggaacgcaaagttgcgggagacgggcggggttggcggcaaccccaagtgtagaatgcgaaaaatccaggaaaactcgaagattaatcgcttacacaggtcttgcgctgccggccacaagccgggacagcgaggaaattatattgaaaatgaatgagttacgccatcaaattgaaaaggctgccgaagctgcgccggccagcccacaggtggcgtatgtcacgattgacgaaggctcggaaggtcagcgcattgacaacttcctgctgaaggtggccaagggcgtgcccaagagccatatctaccgggtgctgcgttcgggggaagttcgcgtcaataaggggcggatcgatgccacttatcgtctgcagtcgggtgatgtagtgcgcattccgccaatgcgggtggcgaattcggcgcaatcggacaatgcccagcatgtgccggcgggggagttcccggtgctgtttgaggacgcccagctgctggtgatcaacaagccggccggcgtggccgtgcacggcggctcgggcgtggccttcggcgtgatcgagcaattgcgccggtcgcggcccgaggccaagttcctggagctggtgcaccggctcgaccgcgagacctccggcatcctggtgctggccaagaagcgctcggcgctggtccacctgcacgagcagattcgcggcagcgcgatggacaagcgctatttcgcctgcgtggccggcgaattcccgaacgcgcgccagcacgtgaagctgccgctatataagtacagcacgccggacggcgagcgccgggtgcgggtgcaggccgacgggctggcctcgcacaccgtgttcaaccgggtcgaggccttccagggcttcaccctgctggaggccgagctgaagaccggccgtacccaccagatccgcgtccacctggcccactcgggtttcccgatcgtcggcgacgaaaaatatggtgacttctcgctgaacaaggcactggcgcgttccggcgccaggccgggcctcaagcgcatgttcctgcatgcccaccggctggtgtttatccacccggccacgggcgagccgctggcggtggaagcgccgctgcccgacgagtgcgtcggattcctgcaacaattgcgtgaactgcatgccccggagtagggtagtgcatcaaacgccacaaggatttccatggccaggcaacaatttgacctgatcgttttcgactgggacgggacgttgatggactcgaccccgaccatcgcgaagtgcatccagcttgccagccgcgacctgggcctgccggtgccggatgacagcgccgccagccacgtgatcgggctgggcctgaaggatgcgctgtcttacgcggtgccgacgctggaccccgtcgactacccgcgcctggccgaacgctaccgctaccacttcctcgctcgcgacgccgacctggtgctgttcgacggcgtgcgcgaaatgctggaggccctgcgcggcgaacattattttcttggcgtggccaccggcaagacccgcgtcggcctgcagcgcgcgctggccgcgagcggtctgacccgcctgttcgacgccacgcgctgtgccgacgagaccttctccaagccgcacccggccatgctgcacgaactgacccgcgaactgggccaggacgtggagcgcacggtgatggtcggcgacaccacccatgacctgcagatggcggccaatgccggcgccaaggggattggtgtgtgctatggcgcacatcccgcagattcgctgcgcgcgatggcgccggtgcattgcgcgacttccatccccgacctgaccgactggctgctggcccatgcctgaggcagcggccggccaggcgccggtgcggctgtgtgccgccgaggacctggaggaaggcggcctgggcgtgcgcttctcggtggcgctggaccagcgcgagatcggcgccttcgtggtgcgtttcgacggcgccgcgcacggctacctgaaccagtgcgcccatgtgccgatggaactggactggcaggaaggccggttcttcgatgcctcgggcctatacttgatgtgcgccacacatggcgcggtttatgcgccggacagcggcgagtgcgtcggcggtccctgccgcggcgcatcgctggccaagctgcgcatcgaggagcgcgacggccaggtctactggctaccggaagcgccataccggattgctgcgcgcatgggcggtgcctgaatgacgggcagggccggcagtcaggccggccgttgtatttccaggcctggggttccaggcgtttccacgagcgatttgcatgacagaacaacagaagccgccatcgggtgaatcgggtcagccggacgagcacaagccagccggcgacggtgcgccgggcgaaggggcgccccaggcggagtccgagcgcctggtcaccgcaccgcgcgccgactacccgctggaagacgaattgcgagccggcgacgacgccgcaaggcgtgaagcgcgcgagcgcaaggcgcgcatggctggagccacggcggggcccccggttggcggcggcgccggctgggagcgcgatctgctggaaaaagtgctgaccgcatcgctgcgcgagcagcgcgcggcacggcgctggcgcatcttcttccgctttgtcggactggctttgctggcgctgatcctggtcacgctgttcgacttcaagggcgatggcgccatcagcacctcgggccgccataccgccatggtcacgctggagggcgaaatcgccgctggcaccccggccagcgcggaatcgatcaatgcctcgttgcaggcggcgttcgctgacggcaatgccgccggcgtgatcctgaagatcaattctccgggtggctcgccggtgcaggcgggcatcatcaacgacgagatccagcggctgcgcacgctttatccgtccaagccgttctatgtggtggtggaagagatctgtgcctcgggcggctattacgtggccgcggcggccgacaagatctatgtcgacaaggccagcatcgtaggttcgatcggcgtgctgatggacggttttggctttaccgggctgatggacaagctgggcgtggagcgccggctgtatacctcgggcgccaacaagggcatgctggacccgttctcgccgcaggtgcccaagcagaaggcctttgccgaggccatgctcaagcagatccaccagcagttcatcgacgtggtcaaggaagggcgcggcgaccggctcaaggatgatccggaactgttctccggcctgttctggtcgggcgagcgcgccgtggagctgggcctggccgacgggctgggcagtgccgactatgtcgcgcgcgatgtgctcaaggccgaggacatcgtcgactacaccgtcaaggagaacatcgccgagcgcgtggccaagcgctttggcgcggcggtgggctcggcggcgatgaagaccatgctgtggagcaaccgcatgcagggcatgcactgagcctggatggcgcggcggcaatggcaaagggggcgttcgcgccccctttgccgtttcttacatggccagcagcgagaagatcgccgggcgcttgtgcaggtcgatccgctcgggacgccagtccgacagcggcagcgtgacgatggtctcgcccggcagggtcaggtccacggccacggacagcagcgtggtgccggcgcagtgctggcgcatggcttccagcagcgccgcattgcggtagggcgtttcgatgaacacctgggtctggctggacttgcgcgagcgctgttccagctcacgcaggcgctgcgcgcgctcgccggcatcgaccggcagatagccgttgaaggcaaagctctggccgttcaggcccgagcccatcaccgccagcaggatcgagctgggcccgaccagcggccgcacgcggatgcggcgcgcatgggccagccgcaccaggtcggcgccggggtcggccaccgccggcacgccggcctcggacagcaggccgccgtcgcggccggcttcgagcggggctagcagtgcggccagggcgtcggcgcgcgtgttgacgttcagctcgcggatatcgatctgctggatcgggcgtgccagcggcgtggtctcgcccagcttcttcaggaaggcgcgcgcggtcttggcgttctcggcgacgaggtaatcgaggttggccgcgatctgctgcacgccggccgggatcacgtcggccagcgggtcggcttcatcgcgcttgccgagggtgttggggatcaggtagagagtgccgctcatcgtgggctcgtgcggatcatgcggaaagaagagggtagccggcctggcgcagcatgccggtcagtgcgatcagcggcaggccgaccagtgcggtcgggtcgtccgactcgacgcgttccagcagcgcgatgcccaggccttcggacttggcgctgccggccacgtcgtaggggcgctccagctgcaggtaggtctcgatttcagcatcggtcaggtcgcgcatggtcacgcgggtctgcacgtcggccagctgcacggtgccggtgcgtgcgtccagcaggcacagcgccgagtggaaggtggcggtgcgcccgcgcatgcggcgcagctgcgccacggccttctcgtgcgtgccgggcttgcccatctgttcgccgtccagggtcagcacctggtccgagccgatcaccagcacgcccggatggcgcgcggcaatggcttcggccttgcgctgcgacaggcgcagcgcggtggcttcgggcgcttcgccggcaagcggggtttcgtcgatgtcgggcacggccacctcgaacgggatgcgcaggcgctccagcagttcgcggcggtaggacgagccggagccaaggatcaggctggggcgggggtctgtggacataagtaatggaatcggaacaggaagcgaaacagtaaaaggtgcggcccgcgttgcaagacctttgacctcgacgcggtttacgtcgtacaatcgcgcgtttagccgcatccgcacccgggcgcagtgccgccaatgtgcgcggcccgtagtccggcaggcgtggaatgtggcgaaccagtcattgtatagcgaccggagcacgcacatgacccagccgattgacctgcgcgcgcttgatctcttcgccttgtgccggaagggtgaaagcctggccggcgacgtggcggtgcgggatttgccgcgcatcttagccgagaccgccgcgcaagcgccagcctcggcacccgatgagacgtttgcctatacggtcactggcttcatgcgtgaagaggcggccgagccgggcgccgcggtggcgcggcggctgtttctcgacgtgaccgtggagggccggatctggctggattgccagcgctgcctggccccctatgccgagccgatcgatacggcaacgcgtttcgaggtggtggaaagcgaggaagcggccgacgccgcgccgatggacgacgacgaagtcgacgtgatcgccggctcgaagcgtttctcgctgctggacctgattgaagatgaagtgctgctggcgttgccggtggcccccaagcatgacgtctgcccgacggtgcacgaaagcctcgtgaccggttcggacggcgaggcgcagccagaggctgagcctgaggaagaaaagcggccttcgccctttgcggcgctggccggcctgaagaccaagcattgatgccgccggcaggcggtgcgcaaggtcttgcaggtgaatctgaagcatccggccgggccccggctacgccttgggcgggatgcgtgtgttaatattgaaaaattctcgaaggagtcatcatggctgttcaacagaacaagaagtcgccgtccaagcgcggcatgcaccgttcgcacgatcacctgtcggcagcgccgctggcagttgagccgaccaccggcgaaacccacctgcgccaccacgtcagcccgaacggctactaccgtggccgcaaggtcatcaagaccaagaacgactgatagcttcgttcggcgtgacgttgcgtctcgctcgcgcatgcctgtaggtcggacactaaaaggtcagagacaaaaaagcggcaagatcgttgccgcttttttgttgggcgctcggatttcccgccgggcgtggcgtgcgccgccgcgctatccgtaccaggaacaatgacgatcaaaatcgctatcgactgcatgggcggcgatcacggagtctccgtgacggtgcctgcggcgatcagttttctttcccgccacgacgacgccgagatggtgctggtcggcttgcccgacgccatccggacgcagctgaagaagctgcacgcgctggaccatccgcgcgtgaccatcgtcgaggccaccgaggtcatcaccatggatgacccggtcgaggtggcgctgcgcaagaagagggattcctcgatgcgcgtcgccgtcacgcaggtcaaggaaggcctggccggtgcctgcatctccgccggcaataccggcgcgctgatggcggtgtcgcgctatgtgctcaagacgctcgaaggcatcgagcggccggccatcgccaccaccatcccgaacgagcaaggctggggcaccaccgtgctggacctgggcgccaatgccgactgcgagcccgagcacctgctgcagttcgcgcgcatggccgaagccatggtggccgtggtcgaccacaaggaacaccccacggtgggcctgctgaacatcggcgaggaagtcatcaagggcaatgaggtggtcaagcgtgcgggtgaactgctgcgcgcctcggagctgaacttctacggcaacgtggaaggcaacgacatcttcaagggcactaccgacatcgtggtctgcgacggcttcgtcggcaacgtggcgctcaagagcaccgagggcctggccaagatgatcggcagtatgatcaaggaagaattcacccgctcgtggttcaccaagctgctggccgcggtcgccatgccggtgctgtcgcgcctggccaggcggctcgacccggcgcgctacaacggcgcctcgctgcttgggttgcgcgggctggtgatcaagagccacggctcggccgatgcccattcttttgagtgggccatcaaacgcgggtatgatgccgccaagaatggcgtgatcgcccgcatcacccgggcttttgccgataaatccagcgccgcaggcgctgcacagcccgccccggagacagaggtgcctggcgcgcatcccagcccccacgtcgcctgagcgccacgcgcgccggtcgagggtgcctgcgggccatacgatccgacaatacatgaccaagtacgcaaaaatcatcggtaccgggagctacctgcctccgcggcgcgtgaccaaccatgacctggccacgcagcttgccgaaaagggcatcgagaccagcgacgactggatcgtctcgcgcagcggcatttcggcacgccactgggccgagccggatgtgaccagcagcgatcttgcggtcaaggctgccgagcaggccatcgaagccgccggcatcgaccgccagagcatcgacctgatcatcgtcgccacctcgacgccggacttcgtgttccccagcacggcctgcatcgtgcaggaaaagctgggcatcaccaaccactgcccggcgttcgacctgcaggcggtgtgctcgggcttcgtgtacgcgctggccaccgccgacaagttcatccgcagcggctcgcaccgcaacgtgctggtgatcggcaccgaggtgttctcgcgcatcctggacttcaacgaccgcaccacctgcgtgctgttcggcgacggtgccggcgccgtgctgctgtcggcgtccgaggagccggggatcctgtccaccgcgatgcactcggacggcaggcatgtcgatatcctgtgcgtgccgggcaacgtcgccggcggcaacatcaccggcaacccgttcctgcacatggacggccaggctgtgttcaagctggccgtgaacgtgctggacaaggtcgcgcgcgaagccatggaggctgccagcgtgacgccgggccagatcgactggctgattccgcaccaggccaatatccgcatcatgcagggcacggcaaagaagctgggcctgccggcggagcgcatggtcgccaccgtgcatgagcacggcaacacctcggcggcgtcgatcccgctggcgctggacgtcgcggtgcgcgacggccgcatccgcgcgggccagaccgtgctgatggaaggcgtgggtggcggcttcacctggggcgcggtgctgctgcgcatgtgattcgcggccggcgccatggcatgccgcgcatgcggggcatgccgcggcgccggccacccgtttcttgttagggttccaatccgatgaaattcgctttcgtatttcccggccagggttcgcagtcggtcggcatgctcaatgccttcgccgataacgccgtggtgcgcgccaccgtggaagaggcctcggccgcgctcggccaggatctcggccgcctgatcgccgaaggccccgccgaagagctgaacctgaccaccaacacgcagccggtgatgctgaccgccgcagtggcggtctaccgtgcctggctggatgccggtggtccggcaccggcgctggttgccggccacagcctgggcgagtactcggcgctggtggccgcgggcgtgatcccgtttgccgacgcggtaccgctggtgcgcttccgcgcgcaagccatgcaagaagccgtgccggtgggcgagggtgccatggccgcgatcctgggcctgtccgatgacgacgtgcgcgccgcttgcgccgaggcatcggccgccggcgtggtcgaggccgtgaacttcaacgcgccgtcgcaggtggtgattgccgggcacaaggccgcggtcgagaaggcctgcgaaatcgccaagggcaagggcgccaagcgcgcgctgccgctgccggtgtcggcgccgttccactcgtcgctgctcaagcccgcttcggaccgcctgcgcgagcgcatggccggcctggctttctcggcgccgtcgatcccgctggtgaacaacgtcgacgtcgccatcgtcaatgatccggatgcgatcaaggacgccctggtgcgccaggccgccgcgccggtgcgctgggtcgagtgcgtgcagaagatggccgccgaaggcgtcacgcacgtgatcgaatgcggccccggcaaggtgctggccggcatgaccaagcgcatcgacggcaacctgaccggcggtgcgatcttcgatccggcctcgctgcaagacacgctggcactgctgaagtaagcaagaggacatccgcatgaccaaacttctcgacaaccaggttgcgctggtcaccggcgcctcgcgcggcatcggccgcgccatcgcgctggaactggcccgccagggcgccaccgtgatcggcaccgccaccagcgaagccggcgcggccggcatcaccgattacctcggcgccgacggcctgaagggcaagggcgccgtgctcaacgtcaatgacgcggccgcttgcgacgcgctcatcgacgagattgtcaagacccacggcggcatcggcgtgctggtcaacaatgccggcatcacgcaggaccagttggcgatgcgcatgaaggacgaggactggctggccgtgatccagaccaacctgacttcggtgttccgtctgtcgcgcgcggtgctgcgcccgatgatgaaggcccgccagggccgcatcatcaatatcacttcggtggtgggctcggtcggcaaccccggccagatgaactactctgctgccaaggcgggcgtggcgggcatgacccgctcgctggccgcggaaatcggcagccgcaacgtgaccgtgaactgtgtcgcgccgggctttatcgacaccgacatgaccaaggcgctgtccgaagagcagcatgcttcgctcaagacgcagattccgctgggtcgccttggccagccggaggatatcgccaacgcagtggccttcctggctggcccgcatgccgcttacattaccggcactacgctgcatgtgaacggcgggatgtacatgaattaatggggttttggctggctggtttcgggggagaagcccgaagaagccgcctgaagtagtagttttccgaaccaaacgggcgcgattcttgcaaagcttggcaggcggcatttctgtcgcctcaaacctgctaaaatgcgcccactttttgtcgaacttccctggagggttacatggacaatatcgaacaacgcgtcaagaaaatcgtggcagaacagcttggcgtggccgaggcagatatcaagaacgaatcgtcgttcgtgaacgatctcggtgcggactcgctggacacggttgaactcgtgatggcgttggaagatgaattcggcatggaaattcctgatgaggaagccgaaaagatcacgaccgtgcaacaggctatcgactacgccaccgcgcacgtcaaggcctaagcccgtcgtctctgcattccgagccacagaaggcaggtgggcgggccgttgcggccgcgccttgctgttttctgtggctttcgtctgtttgaagaagcagaatggaatgtgcttcgccgcgcggcccgcaaggccggcggcgggctgatctccgttccgttcccgtttcacgcacccgtaggaaaacatagtgagccgtcgtcgcgtcgtcgtcactgggcttggccttgtgtctccggtcggaaacacggttgccgaaggctgggccaacctggttgccggcaagtccggcatcgccaccatcaccaaattcgatcactccgcgctttccgtgcactttgccggtgaagtgaagggtttcaatgccgaggactacatcccggccaaggaagcccgcgcgatggataccttcatccatttcggcattgcggccggcacgcaggcgctgaaggacagcggcctggaagtgaccgaagccaatgccgagcgcatcggcgtgctggtcggctcgggcatcggcggcctgccgttgatcgaagagacccacgccgtgctgaccgagcgcggtccgcgccggatttcgccgttcttcgtgcctggctcgatcatcaacatgatcgccggccacctgtcgatcatccacggtatcaagggcccgaacctggctgccgtgacggcttgcacgaccggcctgcacagcattggcctggccgcccgcctgatccaggccggcgatgccgacgccatgctggcgggcggtgccgagtcgaccgtgtcgccgctgggcatcggcggtttcgccgctgcgcgtgcgctgtcgacgcgcaatgacgatccggccgccgcttcgcgtccgtgggacaaggaccgcgacggcttcgtgctgggcgaaggcgccggggtgatgatgctggaggagtacgagtcggccaaggcgcgcggcgcgcgcatctatgccgagctgatcggctttggcatgagcggcgacgcctaccacatgaccgcgccgaacatggacggcccgcgccgttgcatggtcaatgcgctcaaggacgccggcatcaatacggaccaggtgcattacctgaacgcccatggtacgtctacaccgctgggcgacaagaacgaatccgatgcgatcaaggccgcattcggggaccaggcctacaagatggtggtgaactcgaccaagtcgatgaccggccatctgctgggcggtgccggcggcctggaatcggtcttcaccgtgctggcgctgcacaaccaggtgtcgccgccgacgatcaacctcgacaaccaggatcccgagtgcgacctggactacgtggccaacacggcgcgcgagatgaagatcgaggtcgcggtgaagaacaacttcggtttcggcggcaccaacggcacgcttgttttccgccgcgcctgatccgaggttgaggcgggcccttcgcgggctgcgccagggcagggtccacccgttgtggtggaccctgttcgtgttttgtgccggcgaaatgctggcgctcgcgctgctggcgcggacgctggccgctgtaatagccggcagtcaggctggtttccattgggggcatgccgccatggcgctggcactcgtgcttgccgcagcggcaacggtgcgtgcctggccggcgtggtggtgcagcctgcgctggcgctgcacggcagtgctgcatgcgcccgacggcaacggcccattgcggatccgcctgcaagggccgggtgatgcccggcacgaggctgtggtcaggcaatgctggcaggccggcggcgccgctgtcgtgcgcctggcgcccggagcgcccgggatgcccggcgccatctttcttccctggcaggcaggttcgcccgagatggcgcggcggttgcaacgcgccgccagagttgcactgcgggtgcaacctgagatgccggcaggggaacgattttgttagcttgcggtcacaggatgcgcgttgcttcaccgggcgggcttagaatcgtaggtaaaatacaacgtttgtcgtgacgaccaaaccaagagatacactgcaggtgagccatacgtgagcgaacgcgaagccgatcagctcctagttgaacgcgtccagcagggcgacaagcgggcctttgaacttctggtgaccaaataccatcggaagatcattcgcctgatttcgcgcctggtcagggaccccgctgaggtggaggatgtggcgcaggatgcctttatcaaggcataccgcgcattgccccagttccgcggggagtcggccttttatacgtggctgtaccggatcgccgtcaacacggccaagaactaccttgccacccagggccgccgcccggaagcgtccagcgatatcgatgcagaggaggctgaaacttttgcggacggtgagcaactaagggatatcaatacgccggaatcgatgctccacacacgccaggtcgccgagacggtgaaccgcgcaatggaggcgcttccggaagaattgcggaccgccatcacgctgcgcgagatcgagggcctcagctatgaggagatcgccgaagcgatgggatgtccgatcggcacggtgcgttcgcggatcttccgggcgcgcgaggcgattgccgagaaattgcgtccgctgctgggaacggcagagggcaaacggtggtagtagtcgggtagtcaagaagaatgtcgtgcggccagcgttgcagcgtattcctgcatcgataagcgacagaagtgacgggattatcggtgttcaatggaatgtcttggggtgggaaatgggtcaggctcataagcagtcggttcatgtagtggaagcagcggagcagatctccgtattgatggatggcgaactggcgccgcacgaagtcgatgccgtgctgggcctcgcgaaaagcgatgccggcatgtccgactgggccacttaccagttgatcggcgacacgctgcgttcggaagacctgacgcacgcgggttccacctctgctttcctctctcgtttctccgcgcgcctggaagccgagccgcatgtactggtgccggcagtggcgcaggccagcgcccgccaccgcctgctggtcaggccgtcgtgggtgcgccgcgtgatgccgggcaccgcgatcgccgccgccgtggcagcggtcagctgggtggtcgtgccgcagatgcgcggccccgccacgctggccacgcccgatgccgtggtggcacgcgccgaccagccggccagcccggcctctggcatcgtcaccgtggcggcggaaactccccagatgatccgcgacccgcgcctggacgaatacctgcgtgcccatcgcacgtcggtggcaacggatgcgttcgtgcccaccatgcgcacggttgccaacggtgcaaacttcactcaggaaaatacgcaggaataatgccggacatgcataaaggagggtcgcccgcctatgtagcgggcgcgcagaaaatcagggccctgcgtaggtccttttttctggccttgtgtctgagcgctgccgcggccaccgcacagccttcagacagtacgctgaaccgacgcgacgccaccgcctggctcaacaagatccacaaagccgcacagcgcgagaactatgtcggcacgctgatctaccagcgcggcagcgtcatgcacgcctcgcgtatccagcattacagcgatctcgtccacaacgagtacgaacgcctggaaacgctcgacggcaagccgcgcgaggtgctgcgtcagaatgacgtggtgcacagcctgatcccggaagccaagctggtggtggtggagaagcaggaagccaaggatcgcttcccggcgctgctcgccaccaacaagaacgacgtgctggacctgtacgacatgcgcaagatgcccgccgagcgggtggcaggcatggagtgcgaggtcttcgcgctggagccgcacgatgccgcgcgctatgcggtgcgcctgtgggcggagaaaaactccggcctgctgatgcgcgcgcagaccatcggcgatggtggcaaggtgctggagcaggtcgcgttctcgcaggtgcagatcggggtgccgtccgaaaagcagcatatcctcggtgcgatcaagaattccagcagctggaatcgctatgaggtgacctaccagccgaccaatatcgccgacgagggctggtcgattgcggtgccgctcaagggcttccagaagatccgcgaagtgcgccgtccgctcggcgagctgcgcgcacccgcgccgggcaacgcgcgcggccaggtcttcgaagtgctgcaggtcgtttacagcgacgggctgaccggcctgtcggtcttcattgaaccggtttccgagcaacgcgtgcgccgcgagggcgtggcagcgctcggcgcgacccaggtcgtggtgcgccggattgccgatttctggattaccgtggtgggcgaggtgccggcgagcaccgtgcggcagtttgcgacggccgtggagtaccgcccgcccaaggcggtacactgagcttgacgcaggtgcagccgacgccgccggactctgtcccggcgccggcttcatgaaacctgcgcaggggtccccgccacgggatcacatccagacggtttttcttctattcgctgaatcccgggagttgtcgatgatgttcagatctccagccctggcgcgggccgtggtcatggctgccatgatgctgctcggcccgactgttgccgaagtcagccatgcccaggctgccgcctccaactacaacctgcccgatttcaccgacctggtggaaaaggccagcccggccgtggtcaatatccgcaccacggaactcgtgcgccagcgcggtgcacccggcggcgatgacgagatggcggaattcttccggcgcttcttcggcgtgccgatgcccggtgccccggcgcccggcgccccccgccgcggccagccgccgcagcaggaagagcagagccgcggcgtgggttcgggcttcatcatcagccaggacggctacgtgatgaccaacgcgcacgtggtggccgacgccgaaaccatttatgtgacgctgcccgacaagcgcgaattcaaggccaagctgatcggctcggacaagcgcaccgacgtggcgctgctcaaggtcgaggccagcggcctgccgcgcctgccgctgggcgattccaacaaggtccgcgccggcgaatgggtgctggcgatcggctcgccgttcgggctggacaacagcgtgaccgccggcattgtctcggccaagggccgcgacacgggcgactacctgccgttcatccagaccgacgtggcggtcaaccccggcaattccggcggcccgctgatcaacctgcgcggcgaggtgatcggcatcaactcgcagatctacagccgcagcggcggctacatgggcatctcgttcgcaatcccgatcgacgaggcgatgcgcgtgtccgagcagctcaagagctccgggcgcgtgacgcgcgggcgcatcgccgtggcgatcggcgacgtcaccaaggaggtggccgattcgctgggcctgggccgtgcgcgcggcgcgctggtcggcagcgtcgagccgggcggtcctgccgagaaggcgggcatcgaagccggcgacatcatcctcaagttcaacggccgcgatatcgagcgggcctcggacctgccgcgcatggtgggcgagaccaagccgggcacgcgcgtgccgctgcagctgtggcgcaagggcgcggtccgcgaggtcaccatcaccgtcaccgagctggagccggacggcaaggccaaggctcgcagcggcgcaacgcccaaggacgacagcgcggcacaggccggcaagcccaatgcgcttggcctggtggtcaacgacctgcccgaggcacgcctgaaggagctcaagctcaagtcgggcgtcgaggtggaagtggccgacggcccggcgctgcgtgccggcatccgtccgggcgacatcatcctgcgcctgggcgatacggatgtgaccaacgcccgccagttcaacgagctggtgcgcagcctggacaagaaccggattgccgcggtgttcgtgcggcgcggcgatgccacccaggtgctgacgctgcgtccgggcgccacgtccagccgctgatccgcaatggccggtatgcctgcgctgacactgtacggtcgggcatactgccacctttgcgaagacatgaaggtcgcgctggagccgctccggcgcgatttttctttcgccctgcacgaggtggatgtcgatgccgatgcggggctggaagaccgctttggcgaactggtgccggtgctgatgccgggcaccccagcagacttgcagggcggcgccgtggagctttgccactatttcctcgacgaagctgccgtaagggtgtggcttgccgcacatggcagcgcgcgcacaacccgctgatccccgtcggtaaccgccgccaaccgcgccacgccgccatttgacgacccggaagtcattgaaaatccggtaaaattgcggattggcgcaaaaattgcaccccccgaacctgcggtacgcccgcgcccgccttgcggcgcgcggcgccgggccgctcaaccgcttgttgccgcgcgggctctcacgccggcgcccccctgaacactagatggaccatatccgtaatttctcgatcattgcccatatcgaccatgggaagtccaccctggccgaccggatcattcagctttgtggagggctgtcggatcgggagatggaagcgcaggtcctcgattcgatggatatcgaaaaggagcgcggcatcaccatcaaggcgcagaccgctgcgctcagctacaaggcgcgcgacggcaaggtctacaacctgaacctgatcgacaccccgggacacgtcgacttcagctatgaagtgagccgctcgctgtccgcctgcgaaggcgcgctgctggtggtcgacgcctcacagggcgttgaggcgcagaccgtggccaactgctacaccgcgatcgagctgggcgtggaagtggtgccggtgctgaacaagatcgacctgccgcaggccgaccccgataacgcgatccaggagatcgaggacgtgatcggcatcgacgcgcaggacgccacgccgtgctcggccaagaccgggcagggcgtgcaggacgtgatcgaggcgctgatcgccaaggtgccgccgcccgagggcgacgccgacgcgccgctgcaggcgctgatcatcgactcgtggttcgacaactacgtcggcgtggtgatgctggttcgcgtggtcaacggcaccctgcgtcccaaggacaaggtactgctgatggccaacggctcacagcacctggtcgagcaggtgggcgtgtttacgccgaagtcgatcccccgcgatgcgctgacggcgggccaggtgggctttgtcatcgccggcatcaaggaactgaaggcggccaaggtgggcgataccatcaccaccatgcagcgcaaggccgaagcgccgctgccgggcttcaaggaagtcaagccgcaggtgttcgccggcctgtacccggttgaggccaaccagtacgaggcgctgcgcgagtcattggaaaagctgcggctcaacgatgcctcgctgatgttcgagccggaagtgtcgcaggcgctgggcttcggcttccgctgcggcttcctcggcctgctgcacatggagatcgtgcaggagcgcctggagcgcgagttcgacatggacctgatcaccaccgcgccgacggtggtgtaccaggtcgagatgcgcgacggcaccgtgatcaccgtggaaaatccggcgaagatgccggacccgagcaagatcgaggcgatcctggaaccgatcgtcaccgtcaacctgtatatgccgcaggaatatgtcggctcggtgattacgctgtgcacgcagaagcgtggctcgcaaatcaacatgagctaccacggcaagcaggtgcagctgacctacgagatcccgatggcggaaatcgtgatggacttcttcgaccgcctgaagtcggtgtcgcgcggctatgcgtcgatggactacgagttcaaggaatatcgcccgtcggacgtggtcaaggtcgacatcctgatcaacagcgacaaggtcgatgcgctgtcggtgatcgtgcaccgttcgaactcgcaataccgcggccgcgaggtcgcagccaagatgcgcgagatcattccgcgccagatgtacgacgtggcgatccaggccgccatcggcgcgaatatcattgcgcgcgaaaacgtcaaggcgctgcgcaagaacgtgctggccaagtgctacggcggcgacatcacgcgcaagaagaagctgctggagaagcagaaggcgggcaagaagcggatgaagcaggtcggtacggtcgagatcccgcaggaggctttcctggccatcctgcaggtggatgacaagtaagaaggcgccgcgagcagggcagtgccacgcgcggcggcttgccgccgtggtgaaagaacaggctgtaccaggatttcaaaaaaccagaagccgtcatgaattttgcactgatcctttttgtgctggtggtgattacgggcgtcgcgtgggttgcggacaagctcgtgttcgagcgacagcgccgctcttcggcgcggctggcgctggccgaattcgattcgcgccaggccgacctgcagggccgcttcggcgcggcggaagctgacgccacgcgcaagcgcctggccgaggaaaagctgcgccagccgtggtggctggaatattcggccagtttctttccggtgatcctggcggtgttcgtgctgcgctcgttcgtggtcgagccgttcaagatcccgtccggctcgatgatcccgacgctgctgatcggcgacttcatcctggtcaacaagtacgagtacggcatccgcctgccggtggtgaacaagaaggtcatggacatgggcgagccgcagcgcggcgacgtcatggtgttccgctacccgaaagacccgtcgctcgactacatcaagcgcgtgatcggcgtgccaggcgacgtggtgcagtatgccaacaagcgcctgaccatcaacggcaagccggccgagtacgccgcgctgccggatttcctggacgaggagcgcctggcatattccaggcatttccgcgaaaagctgccaggcagcgtcgatcatggcatcctgaacgacgccgaccgcccggcgtttatcgcgggggcggacccggatttcccgtaccgggaaaactgcacttacaatcagcagggcgtgacctgcaaggtacctgcaggtcactatttcgtcatgggtgacaaccgggacaacagcctggattcccgtttctgggggttcgtgccggatgagaatatcgtcggcaaggcctttgtgatctggatgaacctcggcaatttcggacgcgtgggaacgttcaaataagaatccccgcggcgcaagaacactcaacgcaaaacgaggacgagcgcatcatgggtcaacttgggaaggtggtgggcaggattccggtacgacgccgggcaggcatgggcgggttttccgtctggacgctgctggtgatcgtggtgttcgtgatcggggtggccttgccggccctgcgcgcgatcccgagcctggtggagtatttttcggtcaagcgcgccgccagctatgccaagcagcgcgccgccaacaagcgcgaagtggccgatttttttgaaaagcaggcagccatcgaccggattaccgcagtcaaggccgaggacctcctgatccgggaagacgagaacggcaccatccagtcggtcgatttctcgtaccggaccgaggtgcccgtctacggacccctgagcctactgattacctattcaggaacgcagcactgatatgaaccttgacgccttgcagcaacgactcggctaccgattcagcaagcccgaattgctgcaacaggcgctgacgcaccgcagccacagcgcccagcacaacgaacgccttgaattcctgggcgattcggtgctcaactgcgccgtggccgacatgctctatggcatgttcggcaagctcgacgagggcgacctgtcgcgcgtgcgggccaacctggtcaagcagcaggccctgtacgagatcgcccagatgttgcagctgtccgacacgctgcgcctgggcgagggcgaactcaagagcggaggcttccgccgtccgtccatcctcgccgatgcgctcgaagcgatcgtcggcgcggtcttcctcgacgccggcttcgacgccgcgcgcgcgctgatccgcaagctctatatcccgatcctggagcaggtcgacccgcgcacgctgggcaaggacgccaagaccctgctgcaggaatacctgcagggccacaagatcgccctgccgcaatataacgtaatcgccacacacggggccgcgcacagccagcagtttgaagtcgagtgcacggtgcctaaactggaagtccgggtgtttggcaccggcgcctcgcggcgcgctgccgagcaggccgccgccaagctggcgctggacgaagtccagaagctggtgccgcagctgctcaagcgcagccgcgccgagcgcaccggcaagacccgcaagcaacccgtgccgcaggacccacagctgtctctcaggttgaaggaatgaccgaatctacccatccgcagcaagacgcggcggataccccggccgcggcgttccgctgcggcaccgtggccatcgtcggccgccccaacgtgggcaagtccacgctgatgaacgcgctggtcggccagaagatcagcatcacctcgcgcaaggcgcagaccacgcgccaccgcatcgtcggcatccagaccacggatgacgcgcagtatgtgttcgtcgacacgccgggcttccagacccgccacgccagcgcgctgaaccgttcgctgaaccgcgcggtcacgtccacgctgtcgtcggtggacctggtcctgttcgtggtcgaggccggctactacggcgccgacgacgagaaggtgctgtcgctgctgccgaagaacacgccggtgctgctggtcgccaacaagctggaccgcgtcaacggcgagaaccgcctggaagtgatgatgcccttcctggaaaagatggggcagcagttcccgttccgcgaagtggtgccgatgacggccaagacccacgaccatatcgcgcgcctgttcgagatcatccggccctacctgccggaaggcgagccgatgtacgacgccgacgccatgaccgaccgcagcgagcgcttcctggcctcggagatcatccgcgagaaggtgttccgctggaccggcgacgagctcccgtacaccagcaccgtgatcatcgacaagttcgagaccgaaggccgcctgcgccgcgtctttgccaccatcctggtcgagcgagacgcgcacaaggccatgatcatcggcaacaagggcgccaagctcaagcagatctccaccgaggcgcgcctggacatggaaaagctgttcgacggcaaggtctacctggaaatgtggatcaaggtgaagagcggttgggccgacaacgaagcagggctgcgcgcgtacggctacgagtgagcacaacagcgagcgaccagtgagcaagacggctgacatcgcgcgcgcgccggcgccggcgccacggtcccgccgcgccgaccccgtggtcgacgaggccgccgaactgctcgacagcagggcgctgcccggcatggccgacgctgccgcgcgcgcgatgatggatcgtgccatgcgcatcgtgccggcccggcccgagtcgcgcgtggccgagcagcccggctttgtgctgcacgcctggccgtatcgcgagaccagcctgatcctggacctgttcacgcgcgactacggccgcatctcgatggtggccaagggcgccaagcgcccgcactccgcgttgcgtgcggtgttgcagcatttccacccggtctcggtgtcatggagcggccgcggcgaggtcaagaccctgaccaaggccgagtgggtcggcggcatgccgccgctggccggcgatgcgttgctgtcggcgttctacctgaacgagctgctgatgcgcttctgcccgcgcgaggatgcgcatccggccttgttccgccattacctgacgacgctgacgcggctggcgcacggcgagcaagccgggctggtgctgcgcagctttgaacgcgtgctgctgcaggaaactggcttcgcggttgcctttgaccagtgcctgagcaccggcgagcgggtccagccgggcctggactatgtctaccagccagagcgcggcgtgcgccgcgcgcagccgagcgacccgtcgtcgtggccggtggtgaccggccagaccctgctggacatggcgcaggacgattacagccgcgcgcagaccgccgcgcaaagccgcgcgctgatgcggttcctgctgcattattatctgcaaggcgcgccgctgaagacgcgccagattctgatcgacctgcagtatctctgaccgactcaagaaccatccgacttactcctgcacctgctcgcatgatcttccacgcaaatccgggcgtcatcgaccttggcgtcaatatcgaccacgtcgccacgctgcgcaacgcgcgcggcaccgtgtaccccgatcccatccgtgccgcgctgctggcggaacaggccggcgccgacctgatcacgctgcacctgcgcgaagaccgccgccatatccgcgatgccgacgtgcgcgcgctgcgcccgcaactggccacgcgcatgaacctggaatgcgcgctcacgcaggagatgctcgacatcgcctgcgagatccgtccgcaggacgtatgcctggtgccggagcgccgcgaggaagtgaccaccgagggcgggctcgatgtggccgggcgtttcgagcaggtcaaggcggcgtgcgcgcagctggccggtgccggcatccgcgtgtcgctgttcattgatgccgatgccgaccagatcgccgcggcggccgcgtgcggcgcgccggtgatcgagctgcataccggccgctatgccgatgcgcatacgcccgatgagcaggcgctcgagttccgccgcatcgccgatggcgtcgatgcgggccagaagcacggcctggtggtcaacgccggccatggcctgcactacaccaatgtgcagccgatcgccgcgctgcccggcatcaaggagctgaacatcggccacgcgatcgtggcgcatgcggtgttcgcgggctgggagaacgcggtgcgcgagatgaaggccatcatggtcgccgcgcgcctgggcacgcgctatcctgccgcgggcgcgccggcgtgatctacggcgtcggcaccgacatcatccagatcgcccgcgtgcagggcgtgatggaacgcaccaacggccgtttcgccgagaaggtgctgggccccgatgagctggccaagtaccacgcgcgcaaggcgcgctccgagaagcgcgggctggccttcctgtccacgcgcttcgctgccaaggaggcgttctccaaggccattggcctgggcatgcgctggccgatgacgtggcgcgccatggagctgatgaacctgccgtccggcgagcccacgccgatatgccatggcgagctggccgcatggctggcggaacgcgggctctccgtgcgggtcagtgtcagtgacgagcacgactttgccgtcgccttcgccattgccgagcgtgcgggcggggcggcttcccaacctacagccttgtgaatccaacaacttccatgtccaagaagaactctggcaagcggccgggcccggtggtcctcgacgtcgtcggcaagcagctcgacgcggaggacttgcgccgcatcgcgcatccgctgaccggcggcgtgatcctgttcgcgcgcaatttcgagtcgcgcgcgcaactgcaggcgctgacgcgcgccattcgcgcggtgcgagacgacgtgctgatctgcatcgaccatgagggcgggcgcgtgcagcgctgcaagaccgacggcttcacccacctgccggcgatgcactgcctgggcgagctgtgggagcgcgacgtgctggccgcgaccaaggccgccgtggcctgcggctatgtgctggccgccgaactgcgcgcctgcgacatcgacctgagcttcaccccggtgctggacctggactacggccgcagcgccgtgatcggcgaccgcgctttccacgccgatccgcgcgtggtgtcgatgctggccggccacctgaaccatggcctgctgctggccggcatgagcaactgcggcaagcacttccctggccacggctatgtcgaggccgattcgcacgtggcgatcccggtcgacgagcgctcgctggacgagatcctggagcaggatgcgcgcccgtacgagtggctgggcctgtcgctgtcgtcggtgatgccggcgcacgtgatctaccccaaggtcgacccgaacccggccggcttctcgcgctactggctgcaggacgtgctgcgcgcccagctgggcttcgagggcgtgatcttcagcgacgacctcagcatggaaggcgccagcgtcgtcggcaatgtcaccgaggccgcgcgcgccgcgctgaccgcgggctgtgacatggtgctgatctgcaaccacccggagcgcgccgaccagttgctgaccgagctggacgtgggcatcgacaagacctcgcagcgccgcatccgcaagctgttcgcgcgcaggaagccgctggactggaacaagctgcaccaggagggcgagtaccgcgccgcgctgcgcacgctgaaagagcacgacctgatcgcctgaacggggccgcgtgcacaaacaaaaagggcagccgaggctgccatttttgttgaccggccccgcgctgaggcggggtgaggcaagcgccttagttggcgcggctgcggtattcgccggtgcgggtgtcgatttcgatcttgtcgccgatgttgcagaacagcggcacttgcagctcgaagccggtgttgatcttggcgcccttgagcaccttgcccgacgaggtgtcgcccttgaccgccggctcggtgtagacgatctcacggaccagcgtggtcggcatttcaaccgagatggccttgtcgttgtagaacaccacttcaacgttcatgccgtcttcgaggtagttcagcgagtcgcccatgctgtccttctcgacttcgtactggttgtagtcggcgtccatgaacacgtacatcgggtcagcgaagtacgagtaggtgcattcgcggcgctccagcaccacaacttcgaacttgtcgtcggccttgaacaccgactcgcccggtgcgtccgtcagcaggttcttgtacttcatcttgaccacagcggcgttgcggcccgacttgttgtattcggccttctgcacgaccatcggatcgccgccgatcatgaacacgttaccgacgcggagttcctgtgcgattttcatctgaactgttttcctgaaatagaaagtaggaatttggaatggcgaaggcgcgctgccggcatcacctgcggtgagcctgtgagccccaacgagaggcgttcacgcgctcgcgaccccgtgctcagcttgcattcaggtcttcgcccagtgtcggtctgacgcctgggaaaggccctggttctccggcccaggtcgccatttgaatcaaccgatcattttacccgattttcgcaaaacgccaccaggttggcggcaagatcgccaggatgctgcaaacgccgctcccagcgcgctgcgatcgcggcaagtgccggcaggtgcgcacgcagacgcggccagtccacggcattgccgtagccgttccaggcgtgccagaagtccgtcagcgcggcggctgcttccggcgccacgccgccctggccgaacaggtcgagccaggcgtccagcttgacccggtgcgcggcatcgtcctgcgggtagatatgccacaccagcggccgcgccgcccattgcgcgcgcacgaaggaatcctcgccgcgcacgaagttcaggtcgcaggcccacagcagttcgtcaaagtgctcctggcgtacgaaagggatcagctgcaggcacaggctgccgcgttccaccgggtcgccaatccgcagcggggcacccagccattcggcgacctggtccgcggccaggcctgcgggcaccaggcaatggaccgcctcggcggcatcgcgccactgctccagcagcgcgggcagggccgggttgcggtaggcaaacaggctcacgcgcagcgcatcgggccggggcgtcacgctcagccggtgccacaaggccgcctgggcagccgtgccgccgaggaaggcggcgcgctgcgcgcccagcatcgattcccgcagcaggccgccggtgccgggctcgaagccggggaagaagaaatgcttcaccagcggcagccggggatggggcgagggcatcgcatggtgctcccgtacccagggctcggcgctcaggtattccaggttgatccaggcgggtttggggtcacgcgcggccatgcgggccaggaaggcttgcggcacatcacaggcgaaggcttcgatgacggcatcgtgtggctcgaccccggcggtgtcatccacgctgtcgccacccggccgccacggacggatctccacgcccgccaggcgctgcaccgtggcgccggtatcgagttccggcgccagccgcgcgaagctggccaggtcatcgacccacagccgcaccgcgtgcccgtgttcctgtgcgagctggcgtgccagccgccagcagacgccgatgtcgccgaaattgtcgatcacggtgcagaagatgtcccaggagcggataggcatggcgggtgaggggcgggcggggcgcgcgctgaattgctctaaacttgcgattttagaggccatgccgttttgatgcgcgcaggccgtgtagcggtcaccgtccccaatgtccgaccagcaacccgattccccaaatcccgccgacgaagttccggccgaagcggcggccgcccggccagccgaggtgactgccgaggcggctgctgaagcgccgccggagccgttcgacccgcgcccggtcatttcccgcctgcccggcctgccgggcgtgtaccgctatttcgacgcggcaggcaatgtgctgtacgtgggcaaggcgcgcgacctgaagaagcgggtgtcgagctacttcaacaagacccagttgtcgccgcgtattgcgatgatggtggcgcgcattgcccgcatcgataccacggtggtgcgcaccgaggccgaggcgctgctgctcgagaacaacctgatcaaggcgctggcgccgcgctataatatcctgttccgcgacgacaaatcgtacccgttcctgaagctgaccgggcaccgcttcccgcgcatggcgtactaccgcggcgccaccgaccgcaagcatcagtacttcgggccgttcccgagcgcctatgcggtgcgcgagagcatgcagatcctgcagaaggtgttccagctgcgcacctgcgaggacaccgtcttcaacaaccgcacgcggccgtgcttactgcaccagatccatcgctgcaccggtccgtgcgtcaacgccatcagcgaagaggactacgcgcgcgacgtcgccaatgcggcgcgcttcctgcaaggccgccagaccgaggtgctggaaggcctgcagggcaagatggaacagcacgccgagcggctggagttcgagcaggccgcggccgtgcgcgaccagatcgcggcgctgtcgaccgtgctcaagcgccaggcggtggaagaggtaggcgggcaggcgcgcgacatcgacgtgctggccgtcgccgtggagggcgggcgtgcctgcgtcaacctggccatggtgcgcggcagccgccatctgggcgacaaggcctacttcccggcccatgccgacgaagcggcgatgatcgtcgaggatgccgatgagcgcgaggatgacagcgccgccgccgccgcgccgccgctgaccgtcgaccgcatcgccacccgggtgctgtcggccttcatggtgcagcactacctggagcagccggcgccgcccatcatcgtcgtcagccatgcgccggacgatgccacggtgctcgaggcgctgacgctgcacgccgggcgcaaggtcacgctggtgcgccagccgcagggccagcgcaaggtctggctggagatggcgcagcagggcgccgcgctggcgctgtcgcgccggctggccgagcagggcagccaggaggcgcgtacgcgcgcgctggccgaaaccatcgggctggacctggaagacctggcgctgctgcgcgtggaatgctttgacatcagccataccgccggcgaggccacccaggcatcgtgcgtggtgtaccaccaccacgacatgcagaacagcgaataccgccgctacaacatccaggacatcattcccggcgatgactacgcggccatgcgccaggtgctgacgcggcgctaccagaagctggtcgagcagatccaggaagacggcggcatggaggccggcagcgaagccgcggcgcaggtgccgcagatcgtgctgatcgacggcggcaagggacaggtcgaggtggcacggcaggtgttcgaagaactcgggctggatatcggcctgctggtcggcgtggccaagggcgagggccgcaaggtcggcctggagacgctggtgttcgccgatggccgtccgtcgctggaactggggcagggcagcgccgcgctgatgctggtggcgcagatccgcgacgaggcgcaccgctttgccatcaccggcatgcgcgcgcgccgcgccaagacgcgcaccacctcgaggctggaagagatcgagggcatcggcgcgcgccggcgccagaagctgctgacccgcttcggtgggctgcgcggcgtgatggccgccagcatcgacgaactggccagcgtcgagggcatttcacgcggcctggccgaagagatctaccggcagttgcactgagcgcgcggggccgcgcggtgggaaattgaccagtgatggtcgattggtccggaaatcggcgacaatcgcaagattggttaccgtcccccgccgcccgagttccatgcccttcaatttcccgatcctgctgacctggcttcgcgtcgccatgattcccctggtggttggcgtgttctacctgcccgacgcgtggttgccgatgcacgccaagaacctgacggcggcgtcgttcttcatcattgccgcggtcacggactggctggacgggttccttgcgcggcgctggaaccagacctcgtcgttcggggccttcctggatccggtcgccgacaagctgatggtgacggcagcgctgctttcgctgctggcactgggccgggtcacggacctgatcgcgctggtgatcatcgggcgcgagatcaccatttcggctctgcgtgaatggatggcgcagatcggcgcttccaagagcgtcgcggtgaacttcctcggcaagctcaagaccacggtgcagatggtggcgatcccgctgctgctgtacagcgaccgcctgttcggcttcgatgcccacctgctcggcacgtggatgatctacgtggcggcggtgctgacgctgtggtcgatgttctattacatgaagctggcctggccgcaaatccgcgagcgcagcgggatggtggcgcgcgccggcgcgcagaaatgaaaagaatttttgaaaaggtgttgacggcgagagcagttctttgcataatctcattctcgttgctgacgacacaaacgaaagcagcgagataaggtgggtttagcgcaagatgttgtgagatagtagcgtgttgcggcataaaacaccttattggaattcggtagtgcccctgcgggagtagctcagttggtagagcgcaaccttgccaaggttgaggtcgcgagttcgagactcgtctcccgctccaggttaaagaaggtccggcagcgtgcttgcgcggtgcggggctggcagtaaaaagttgtatgcgggagtagctcagttggtagagcgcaaccttgccaaggttgaggtcgcgagttcgagactcgtctcccgctccaatccccaaagggaagcaccgcttccctttttgtttgggttgaatcgccgcaagacattgccggaagctgcgctccggcagcatcggctgaatgcggatacaatccagcagcacgtcacctggcggggtggcagagtggttatgcagcggcctgcaaagccgtgtacgccggttcgattccgacctccgcctccagttgcatgcagaacggcgcctcgcggcgccgtttttgttttccgggccagttccctgcctcgccttcagtcaagcaggcgccggatcgtccgccatctccgcgcctcgggcacgtggcgggcatgttacattactcctgtcgtacgcttttcggggggctccgcgtgatggattgcggggcagcatgtcaatcgccatccccgatccgtgacgcgccgccggcgtgtccggggccgctgcggcacttcccgttcttccccgttccgatgctgctgccaattgttgcggcgatttccccgcgctgaccgctggtgcgcgccggatgcgctgtcgcggttgccagggccgggagcgggttagccgttcagcccctgacacgaggaatcccgcgcgcatgcatcacgccaccccgcttatcagtaccatcgtcggcggtatcgtcctggcctttatccttggcgccatcgccagccggctgcgcctgccgccgttgatcggctacctgtgcgcgggcatcgtggtcggtccgcacacgcccggctataccgccgaccaggccctggcgccggagctggccgagcttggcgtgatcctgctgatgttcggggtggggctgcacttttcgatcaaggacctgatggcggtcaagcgcatcgccattccgggggcggtggtgcagatcggcatcgccacgctgatgggcatgctggtggcctggggcttcggctggtcatgggggcaggggctggtgtacggactggcgctgtcggtggcgagcaccgtggtgctgctaaaggccttgcaggagcgtgacctggtggagtcgccgcagggccgcatcgcggtcggctggctgatcgtggaagacctggcgatggtgctggccctggtgctgctgccagcgatggcaggtctgctggcggcttccggcgtaacctcgggcgaaacatcgggcgaggccgcgccggctaccggtgacgtggtgctcgcgatcttcgcgacgctgggcaaggtggccgctttcgtcgcggtgatgctggtgatcggccggcgctttatcccgtggatgctggagcgcatcgtctggaccggcaaccgcgagatgttccgcctgggcgtgctggcgacggcgctgggcgtggcctacggcgcctatgcgctctttggcgtgtcgttcgcgctgggcgcgttctttgccggcatggtgctggcggagtccgagttcagtcatcgtgcggccgaagagtcgctgccgctgcgcgatgccttcgccgtgcttttcttcgtatccgtgggcatgctgttcgacccgatggtgctggtcaacgatccgtggggtgtgctggcgacggtgtttatcatcgtggtgggcaagtcgctggcggcgctgggcatcgtgcgtgccttcgggcattccgggcagaccggcatgaccattgccgtgagcctggcgcagatcggcgagttctcgttcattctcgccagcctcggcgtctacctgaagatcctgcccgagcgcggccaggcgctgatcctggccggggcgctgctgtcgatcatgctcaatccggtgctgttccacctgctcgacctgtacacggcgcggcgcaatcgcagcgcggatccgcagccggcctgaccggagcctgggtgcggctcagccgccgatccgcggcgccatggtgcgcaggtattcggtaaaggccagcagcccctgggtcgggaacttgtcctggtgcaccaccagctgcagcggccgcacgatgcgtggcaggccgtcgcggatcgccaccagcgtgccgcgctccagttcatcgtgcaccacatgcagcgacaggcagctgacgccgaagccgctcatcactgcgcgcttgatggcttcggcgttgcccagctccagcgcgaagcgcagctcgcccagcagcggcaccagccgttcctcgatgacctcgcgcgtgcccgagcccggctcgcgcacgatccactcggcatcgcgcagcgccaccaggtcgtgcggcacggccgcaagcggatgcgaggggccgactaccaccaccatctcgtcatcgcaccagggcacgctgcgcaggtcgcgctcatggctggcgccttcgaccaggccgatatcggcgtcgaactgcagcaacgattgcagcacctcgcgggtattgccgatgcgcaggtccagcgtgcacgggccgctgcgcgaatggcggaagcccgccagcagcggcggcaggatgtagctgcctatggtattgctggccgcgatgcgcagctgcacgccggtctgggtggcaaagcgctccagttcctgggcctggtccagcagcgacagcgcgcgcgggaaaaactggcggccggtctcgttgatgctgagccgacgggccacgcggtcgaacagcgggctgtcgagcgcgcgctcaagctcggccagcgaggcgctgacggccgactgcgacatcgcaagtgcctgcgccgccgccatggtgctgccatgctgggccacggcaacgaagacggacagctggcgcagcgtcaggcgcaggggacgatgttcgggccggggatcggggcggtggtccatatcgatataatcaataacgcataacgatattacccgttttacgggttagcggggggccagtacgcttgagtcactaaagaacacgacccgagcctgccatgtcctccgtctccgccccccgcactcgcaccaccccggccgccgcgccggccttgccgccgccgtggtcgcagcgcctgctgacgctggtaccgctgggcggcattgcctggctggcgattgcgctggccgagcatccggccgtggcgcgctacgggctcagcgcgctgacgctggccatgtgcgccggcatggtcgcggccaacacgctgccgcgccactggctggcgccgctggcccccggcatgcaagtcgcacgccaccacctgctgcggctgggcgtggcgctgtacgggctgcgcctgacctttgcctcgattgtcgccctgggcctgccgggcatcgtggtgccgctgaccatgctggtggccacgctgctgttcggcacctgggtgggtacgacgttcttcggcctgagccgccgcgaagcgatcctggtcagctccggcagcgccatctgcggtgccgccgcggccatcgccgtatcatcggtggtgcgcaccgacgacaaacagaccgccgtggcggtggcgacggtggtgctgttcggcaccgtcggcatgctgctttatccctatctgtacgaactggcgaccggccactggcactgggccgtcagcgagcgcatgttcggcatctttaccggcgcgacgctgcacgaggtggcccaggtgatcgccgccggcaagatgatcagcgagccgaccgccgacgctgccgtggtggccaagatggtgcgcgtgctggcattgggcccgctgctgctggtgatggcgctgtggccgcagggcggcgagcaagccgagcaaggcaccgcaggcggcagccgcctgcatggcatcctgaagtcggtgccgtggttcgcggtggggtttgtcgcagtgatggcggtcaactcggccggcaccgtgcccactgcctggaaggcgccgctgatcgcgctggacaactggctgctggcctgcgcgatgctggcgatcggcctgcacacccgcatcggcgatctggtgcgcgccggacgcaagccgctggcgctggccggtgtgctgttcgtgttcctgatgggggtgggtgcgctgatgtgctacgcgatggcctgacgcgcgcggagctgaaggcagcaaaagaagggggccgatggccccttcttttattttgaagcgggagcggaggggggctgtacaccctggtgcggccgacgggactcgaacccgtaagcctggaaaggcggcagattttaagtctgctgagtctaccaatttctccacggccgcacggcaagcccggtattgtggtggctcggcatcccggatgcaagcgcgttactgctgcgggcgcctggcgcgcgaaaaagtgacgccgctgttacggctggtaacaatgtcgaccttgccgttgcacctggaaaattccgaacccctacaatacggattaagagaaatctcactttgagaggcggatatgaaacgttggtggctcgtagcattcggtgtcgcagccgggcttgcttccggggcagcaatggcccatgtgagcgtcggcgtggcaatcggcgtgccgggcgtagtggttggcgcgcccgcctattatccgccagccccggcttactatgcaccgccgcctgtcgtggtggcacctgcgccggtctactacggcccgcccccggtggtggtacgaccgcgtccggtctattacggtcctggctactacggcccgccgcgctattacggcggccaccgcggctactatggcccgccgggataccatcgtggccgtgggcatggccatggtcatggccgttggcgcgacgactgatcgcccgttcgagctgcgcaagctttttgaaagagaaggggccctccggggtcctttcttttttcctgccgcactgcgacatgaggcgctgaagccagttcccggaaattcgaccccttgctgagcgtagtcaaattatttgaacagactgctcaaagcgtcatctctatcgtcataagggttttcccctaaactaccgttgtgacatcgtgatgacggcaccgcgaagtgctgtacggtgcctcgactaacaatagcaaggggaatatccatgaagatcacacaagccgttgctgccgtcgcagccctggccgcgctgggcgcgctttccacctccgcatttgccgccgtcggcaaggtcgatccgtacctggacggcgccagggtcggcaagacggacccgtacaccgatggtgccaagatgggcaaggttgatccgttcaccgacggtgcccgcctcggcaagcccgatccatacaccgatggcgcgcgcatgggcaagccggatccgtactcggacggcgcctgaatcgctgttgtccgtccatgatgaatggcccgccaagcgcgggccatttttgtttttccccgcgctccggcgcaccgcaatggggcgcctgtcatgacgatggcgggggtgcggcgctatacttcggcctcaaccaaatgaatgaccaggagagcggcatgcagcaaaagacggttctgacggcagacgacgtgaagaagatcatggccgctgcggaaaccgaggcgaagaatcatcaatgggccgtgtcgatcgtcgtggtggacgatggcggccatctgctggcgatgcagcgcctggatggtgccgcgccgatctcggcctatattgccggcgaaaaggcccgtacctcggcgctgggccgtcgcgagtcgaaggtatacgaagacatgatcaacaacggccgctactcgttcatgacggcgccggtactgcaaggcatgctggagggcggcgtgcccatcgtctgcaacgatcaggtggtcggtgccgtgggcgtgtcgggcgtgaagtcgaccgaagacgcgcagatcgcgcgtgccggcatcgctgcgctgggcctgtaaagcccttgcgccggccactgtgccggcgcatgaaaatgccccgcaggcatggcctgcggggcggcataaaagagggcatggctgggtacggtcggcccggcgtggggtctgaatcccgcccgcggcaccagtacctggctactgcccaacacctcgttccgaggtggtccccacaaaagtctttactgccacgtacgtggcacccgcgcccaacgcgggtctagatcgcttccctctggcttcaaccttgcggtatcgccgcggggccgcgtcatttcgtcaggatcagcttgccgtagcgcgtgacgcgcagcgtgtagacatcgccgttgtgcaggatcggcagggtgctggcgccgcgcatgatggcatccagggccaccgcctcgccggcaggcgctggcgacaggctgtcgcgcaccagtgcctcgagccgggcgggcagggccgccaccgcggatttcacggatgcgatggtcgacggtgccgccttcgcgctggcctcgcggcgcggttgcgcggcgacctcgacgcggcgcagcgacagccggcggcgggtgacttcacgcggttgcgacagcggcagggaaagtgtgctcatcttctggctccgttctgcaaaaagggcgcgccggtcatggcgcagtcgatggaaagatattaaatgagaattgttatcattacaatagcctctgactaagattcgcggaacgaccaagtgcggttagaagggggcgcaagaggcgacgcagcgcaggctggcgccatgactcggcgccatcaacgacaaagggcaccctgaggtgccctttgtcgttccggagcgcctggcggcgcccgcctactgcttgggttcggtgataaagccgatcttgcccaggccgccgtgctgcgcggcggccatgacctcggccacgcgctcgtagcgcacctcgcggtccgcgcgcaggtgcagctcaggctgcggctgctgctgcgcggccagcgcgatattgcttgccagcgtggcctggtccacttccacctggttccagaagaccttgccggcagcgtcgatcgagacgttgatattctgcggcttcgggtcgttcggggtgttggtggcgcgcggcaggtcgatcttcaccgcgtggttgatcacggggatggtgatgatgaagatgatcagcagcaccagcatgacgtcgaccagcggcgtcatgttgatctcgctcatcacctcgtcgtcgtcgccgtcgagagtaccgaatgccatgatgacttccttgcttgcggtttagcgctgagccgcggccaggcgcacggtaccgtcctcggcgcgggcgccggtggggcgcacgcgcgcgccggtgacgaagtaggcgtgcaggtcgtgggcaaagcggttgagcttcgagatcaccgacttgttgccgcgggtgagggcgttatagcccagcacggcgggaattgccacggccaggccgaaggcggtcatgatcagcgcctcgcccacgggaccggccaccttgtcgatggtcggcacgcccgaggcgccgatgccgatcagagcgtggtagatgccccacacggtgccgaacaggcccacgaacggtgcggtcgagcccaccgaagccagcactgccaggcccgattgcatgtgcgccaccgagtcgtcgatggagctcttgagcgagcgggtcaaccagtcggagatatccatcacgtcgtgcagctgcggctggctggcgcggtggtgctgggcggcctccttgccggcgatggccagcgtgcggaacgggttggagtcgccggcgcccagggtttcgagcgcgtggtcgaaatcgtccgaatgccagaagcgcttttccgcgccgtgcgccatcttcttcaggcgcaccagatcccacgccttggtaaggatcacgatccatgaggcgagcgacatgatcagcagaatgatcgcggtcgcacgcatgacgaagtcgccttgcgtccagaggtgggagagtccgaggtcctgcatgtgttggttcctggtgagttcgcttggtttaggtcagatcagagatcggaaatctggggcggtcagttcagttcgaagccaatcggctgctgcgccgtgacggcgacggcgcggccgttgtccatgtaaggcttgcagcgcatggcctgcacggcctctaccgcggcctggtccaggcgcgatgaaccgctcgaggatacgacggaagtcttcacgaccttgccgctttcgtcggtggtcaggcgcaccacggccttgccggtctcgcccatgcggcgtgactgggaaggatacttcggttgcggcgccgtgcactggatttcgccgatgccgaccgcacgcggcgcggcggataccggcgccggggcgggctcaggtgccggtgccgggggtgccggcggcgcgggaggagcctcgggcgcgttcggtgttggcggcaggctggctaccggctgcggggttggcttgggctgcggcggggtcggcttgggcgtggtcaccttcacctgcttgggcggggtttcctgcttgggcttgggtttgggcggctccggcggggcttcctgcttgggaggctccagcgggatgatgcgcgcgacgatttccggcgagatcaccgcctcggtcagcttgcggcccaggccgctttggatcaggtagagcaggccgacgtggaacagcagtacggcgagcgtaatcttgaggaagcgttggtcgaacatgtgtcaacaacaaaagtctgccagcggtggcaccgcggcggcgctgtgcgccgtcacttgcgataaaacaggatcagcgagatgccgcaaccaaccagcaggctaagcagcaattccatgataaacgctccttcaactgggttgccgtgggagcgccactctggggcagcgtgtcagcgggctagtataaacgataatgattcttattttttgtaatttgtgcgtcgcaactggaattttctggcccggcacgttataccggcaagtccaggcagcatttcgggaggtgatgcagcggtgcatgcgcgctggcgcgctctggcactttgctgcgcttcggtgccccaggccacaattgccggtgcccgtggcgcacaggcatgcgcggtcggtaccaaagcgcgctagcataggaagaaactgcagacgtggcggtgccccggtcgcggccccgccatcgcgcacagcgcgctcggggacccgttcatggacttcacacgttttgctgaagatgaccgatcgacgattctgcgctccatgcctggcacatcgtccagttcagcattggactggatgtgcgcgcagtttgccctgcgcgtggtctgcgcgctgggcccgcgcttcaacctgcgcagcaatatcaacgatgtcctgaccgtcagcgcgcaggagatggtgtggccgtacggcgtggtgctgcgcgtgcagcgcttcctggccgcgcgctgcgccgacatgcccgcctggaagggcaccgcccgcctgacccctgaggaattcctggaccgccacggccaatggaacagcgctttcgacgaaagcgcgctgttctattacctggacgagtacgtcaagcaccacgccaaggacatgttcgccgtgttcgatgcttcggccgctgccatcgcccagcgcctggaaggcgagcgcgtactgctggtgcgcaatatcgacatgctcagccatgtgctggacctgcccgagcacgagcgcaagctgctgctgtacgcggcgctggccaagtacaagcgcgacctgcgcgcggtgatggtcgactgcaaggtggcgcacagccaggaagcgttccagatcctggccgggctgaccggcgccggcgcggccgacgtggccgcctcgctgcgcccgggctcgcggctggagacgctgaacctgatcgaacagccgctgccggaaaacagcgtgaccgacctgggcgacctgatgcggctctcggaccggctgctgcacgtgctgctgggcaactacgccaacgaagccgagatgatggcggtcttcacccgcccggccgcgccgcccacgctgaccactgccgactatccccatgtcgagaccgacgcgcgctacctgtgcgcgctgctgtccaatgccacgcgccagcatgcgagcggagtcaacgtgctgatctacgggccgcccggcaccggcaagaccgagttcgcgcggctgctggcgcgcgaggcgggctgcgagctgtatgaagtcgattgcctggaccgcgacggcaacagcctgtcgggcaaggaccgctaccgctcgctgcaggtgtcgcaggccttcctgcgcgggcgtgcccataccgcgctgctgttcgatgaggtggaagacgtcttcccgggcagcgcgcgcgagctgatgagcctgttcggccaggaagacacgcgcgcctcggtcaacggcaaggcctgggtcaaccagacgctagagcagaacccggtgccggtgatctggatctcgaattcgatccggcagatcgacccggcctacctgcgccgtttccagttccacctggagctgaagatcccgccgccgctggtgcgcgagaacatcatccgcaagcacctgggcgggctggacgtcagcgacgcatttatcaccgggctggccgggcgcaagacgctgacgcccgcgcaggtgcagtcggccgcgcgctttgtcgagctggcacggcccgacgtggaagagccggtggaagcgctgatcctgcgccagctggaacacgccgaccgcgccatgggtctgcgccccgaggccgaggcgcggccggtggtcacgcactaccggctggagaacctgcacctggaaacccgctacgaggtggtcaagatcgtcgacgcgctgcgcgtgcgccagcgcggcacgctgtgcttctacggcccgcccggcaccggcaagaccgcgctggccgagcatatcgcgtccgagctggacctgccactgatgatccgccgcgcctccgacctgatgagcaagtatgtgggcgagaccgagcagcagatcgccgccatgttcgcgcgcgccgaagaggatggggcggtgctgctgctggatgaggccgacagcttcatgcagagccgccagcaggcggtgcgcaactatgagatctccgaggtcaacgagatgctgcagggcatggagcgctttaacggcatctttatctgcaccaccaacctgttcgaccgcatcgacgaggcggcgctgcgccgcttctctttcaagatccgcttcctggcgctcaagcccgcgcagcgcgtggcgatgtttgtcgacgaggcgctcgacggcgatgccgccggcctgaccgacagcatgcgccgtgaactggatacgatggattgcctgacgccgggcgacttcgccacggtcaagcgccagtgcgtgctgttgggcgaggcgcttacgccggatgagttcctggcacagctgcgccaggagcacgcgatcaagcccgaggtgcgggagcaccggccactgggcttcctgcagtaggggaaggcgccggtcagaggtcagagcgccggcgccggctcgatcaccacggtttccgcatccgcttccacctgcagcagcgtggctgccatcgcgcgcaggtgcgcggcgtccttggtcgaggcaaagcggtcgtgcggcgtggcatcgggcgcggcggccagcttgtgttcggccagcttgcgtgccagctggcgcgcaatggcgctgccggtgtcgaccagtgccagctggtcgccaaccatcgcgcggatcgtgccggagagaaaagggtagtgggtgcagcccagcaccagcgtgtcggcgccggcttcgagcatgggcgtgaggtaggtatcgaggcgctcgcgcacggccgggccatcgatgtcgccttgctcgatcagcgataccaggcccaggccggcttcgcagataaaacggctttcaccatccagagacgccagcaggcgcgcgaacttggcgctcttgagcgtattggcggtggccagcacgcccaccaccttactgcggctggccgcggcggcaggtttcaggccgggttccacaccgatgattggtagcggcagttgcttgcgcagcagctccacagcgtggccggtggccgtgttgcaggcgatcaccagcgccttgcagccttgggcgatcagccattcgcaggcctgcagggtgcgcgcttcgacaaacttctcgggcttctcgccgtacggggcgtatttcgaatcggcgaggtacagcaccgattcatggggcagcagcgcgcggatctcgcgcagcacggacaggccgccaaggccggaatcgaagacgccgatgggtgcgggattcactggggtgcagggacgacaagaaacaaggtagaaaaaagccgggtcggaacccggcttctttttcgagcgcgacggcagattctaccgtcctgccaggcttacagcgcggcgaccgggatcttgccgatcttggcctgccattccgcggggccggtcttgtgcaccgaggtgccttcgctgtccacggcgaccgtcaccggcatgtccttgacgtcgaactcgtagatcgcttccatgccgaggtcttcgaagccgaccaccttggcttccttgatcgccttggccaccaggtaggcggcgccgcccacggccatcaggtaggccgacttgtgcttcttgatggcctcgatcgccaccgggccgcgctcggccttgccgatcatcgagatcaggccggtttcggccagcatcatctcggtgaacttgtccatgcgcgtggcggtggtggggccggccgggccgaccgcctcgtcgcgcaccggatcgaccgggccaacgtagtagatcacgcggttcttgaagtccaccggcagcttctcgcccttggccagcatgtcggcgatgcgcttgtgcgcggcgtcgcggccggtcagcatcttgccattgagcagcagggtctggcccggcttccacgaggcgacttcttccggcgtcagcgtgttcaggtcgacgcgcttggaggtctcggtgttcggggcccactctaccttcggccattgcgacaggtcaggcgcttccagcttggccgggccgctgccgtccagcgtgaagtgcacgtggcgggtggcggcgcagttggggatcatcgcgaccggcttggacgcggcatgggtcgggcaggccatgatcttgacgtccagcacggtggccaggccgcccaggccctgcgcgccgatgcccagcgcgttgaccttctcgtacagctcgacgcgcagttcctcgacccagtccttggggccgcgggcgatgatgtcctggatgtcgatggactccatcagcgattccttggccatcaccatggccttctcggcggtgccgccgatgccgatgcccagcatgcccggcgggcaccagccggcgcccatggtcggcacggtcttcagcacccagtcgacgatcgagtcggacgggttcagcatcacgaacttggacttgttctccgagccgccgcccttggccgcaacctggatgtcgacggtgttgcccggcaccacttcgtagtggatcacagccggggtgttgtccttggtgttcttgcggccgccttcgggcgggctgacgatcgaggcgcgcagcacgttatccggatgcgtgtagccgcggcgcacaccctcgttgatcatgtcggtcaggcccatggtggcgccatcccagcgcacgtccatccccaccttgacgaagatcgtgacaatgccggtgtcctggcagatcgggcgcttgccctcggcgcacatgcggctgttggtcaggatctgcgcgatcgcgtccttggccgccgggctctgctccagctcataggcgcggcccaggctggtgatgtagtccatcgggtggtagtagctgatgtactgcagggagtcggcgacgctctggatgaggtcttcttgcttgatgacagtcattttgtgggggagggcagcggtgaaacacagcctgaaatcatacactgagccggggcgctctgcccggctgcatacatccgtctacagccgataatgtgcggcaaacgccgctgcctgcgtgggggcgggcccaaaagcaaaaaccgcggcacatggccgcggtctggctgggactaggcgtccgatggcgcattaatgtgattagtgcttggcagctgcgccggccgggtgcgacaccatccggtccacccaggccatggcgactgccgacagcaggaaggcaatatggatggccacctgccacatgatggtgtgcgtggtccgttgctcggcatcgataaaggtcttgagcaggtggatcgacgaaatcccgatcagcgccatcgacagcttgaccttgagcaccccggcgttgacgtggtccagccattccggctcgtccgggtggttgtcgatgcccaggcgcgagacaaaggtctcatagccgcccacgatcaccatgatcagcaggttggagatcatcaccacgtcgatcaggcccagcaccaccagcatgatcttgttctcgtcgaactcggtcacatgcgccagcagatgccagacctcgaccaggaagtggtagacatagacgccctgggccacgatcaggcccaggtaaagcggcaactgcagccagcgcgacgcgaagatgatgctcgggatcggccgcatggtctgcggcctggtcattggattggaagccatgggcggggcggtgtcagcgagttgaaaggcggcgtggattgtaccaagcgccgatgaccgggcggtgttaccgaccgtaaccgaaccgttcgtcgccggcgtggctcagcccgcggcgccgggatcggcgccggccgccttgccgcgccacgcgccgcgcgcgatccgccccggccagctggccagcacgatcccggccagcacgcacgccagcgccaccccatgcggccagcccggctgctcgcccaggaagacgatgccgtaggtggcagccgccactggcagcaccgaggtgaacacccccgccagctgcgccggcacatggcggattcccttcatccacagccagaacgagaacacgctcgccgacagcgcataccacagcagcatcagccaggtctgcgtgggcaccgtcgacgcatcgaagcccagcagcggcaccagccccagcggcagcatcagcagtccgccaatcaaatgcgtgtaggcacagatctcgatcgcggccagcgtctgcgtgagccggcgcgacaggatcacgtagatcgattcgcacaccaccgcgcccatgatcatcaggttgcccagccatgcctggctgccgctgccggcaccgtgcgcgtcgccccgggcgatattcagcacggcgatgccggtcatcgccagcagcaccgatgccaccgtgcgccgcgacagccgttcgcgcagcagcagccacgacaggatcgccaccgtggccgggatggtgctggtgatcacgccggccgccatggcgctggtcagccgcacgccattgagcatcagcagcgtaaacaggaaggtgccgaagaacgcctgcaggaacaggttcagccattccccgcgcgagacccggcgcatgcgcgcgggccggtaccagggcgccaggcagacgatggcaatgacaaaacgcagcagcgcgaacagcagcaccggcacatgcgcgatgatcgatttgccgaggcccacgttgctgccgaccagtgccatcgaggcaaccaggaagagggcgtagaccggggagaatgctgaagggttggcgggcacgggtacggccttggtcttccggcgggcgccgcggcgggtgctgagccggcaggagcggcaagggtaagcgccgcgatcaggtatggaactcgcggcattatagctgtgctagcctaatggagaaggctgcactttcgcggcacgtgcgtggatttttcccgctgcattgcaacaagttgcaggcacgccccggcccaccgtcaggtcttaccgtcaggtttaagtaagccgtcgggcgtaacgtggcagccaaagccagtccaaaatcaggagacaaacctatgtccgccatcgaatcggtgatgcaagagcatcgcgtgttcaacccgcccgaaggcttcgccagccaggccgcgatccccagcatggaggcctaccaggcgctgtgcgacgaagccgagcgtgactatgaaggtttctgggcgcgccacgcgcgcgagctgctgcactggaccaagcccttcaccaaggtgctggaccaaagcaacgcaccgttctacaagtggttcgaagacggcgagctcaacgcctcttacaactgcctggaccgcaatctgcagaacggcaatgcggacaaggtcgcgatcgtgttcgaggccgacgacggcagcgtgacgcgcgtcacctaccgcgagctgcatggcaaggtgtgccgcttcgccaacggcctgaaggcgctcggcatcaggaagggcgaccgcgtggtgatctacatgccgatgtcggtcgaaggcgtggtcgcgatgcaggcctgcgcacgcctgggcgccacgcactcggtggtgttcggcggcttctcggccaagtcgctgcaggagcggctggtggacgtgggcgcggtggcgctgatcaccgccgacgagcagatgcgcggcggcaaggcgctgccgctcaaggccatcgccgatgacgcgctggcgctgggcggctgcgaggccgtcaggaacgtgatcgtctaccgccgcaccggcggcaaggttgcctggaccgaaggccgcgaccgctggatggaagatgtcagcgccggccagccggatacctgcgaagccgagccggtgagcgccgagcacccgctgttcgtgctctacacctccggctccaccggcaagcccaagggcgtgcagcacagcaccggcggctacctgctgtgggcgctgatgacaatgaagtggaccttcgacatcaagcccgacgacctgttctggtgtaccgcggacatcggctgggtcaccggccacacctatattgcctacggcccgctggccgcgggcgccacccaggtggtgttcgaaggcgtgccgacctaccccaacgccggccgcttctgggacatgatcgcgcgccacaaggtcagcatcttctacaccgcgccgaccgcgatccgctcgctgatcaaggccgccgaggccgacgagaagatccacccgaaacagtacgacctgtccagcctgcgcctgctcggcaccgtgggcgagccgatcaaccccgaagcctggatgtggtactacaagaacatcggcaacgagcgctgcccgatcgtcgacaccttctggcagaccgagaccggcggccacatgatcacgccgctgccgggcgcgacgccgctggtgccgggttcgtgcacgctgccgctgccgggcatcatggccgccatcgtcgacgagaccggccatgacgtgcccaacggcaacggcggcatcctggtggtcaagcgtccgtggccggccatgatccgcaccatctggggcgatccggagcgcttcaggaagagctacttccccgaagagctcggcggcaagctctacctggccggcgacggctcgatccgcgacaaggacaccggctacttcaccatcatgggccgcatcgacgacgtgctgaacgtgtcgggccaccgcatggggacgatggagatcgagtccgcgctggtgtccaacccgctggtggctgaagccgccgtggtgggccgccccgacgacatgaccggcgaggccatctgcgccttcgtcgtgctcaagcgttcgcgtccgactggcgaagaggccgtcaagatcgcgacggagctgcgcaactgggtcggcaaggagatcggcccgatcgccaagcccaaggacatccgctttggcgacaacctgcccaagacgcgctcgggcaagatcatgcggcgcctgctgcggtcgctggccaagggggaggagatcacgcaggacacctcgacgctggagaatccggccatcctggagcagctcaagcaggcgcagtgatcgtctggcttcggcccgatcgagcccttgaacccgccgccgcgttcccgcgcgccggcgggtttgttacgatagccccccaccgaccacggaccgtccccaatgcctgaagcccagtcgcgctttcgccgacggttgctgctgtactacggcctgttcacgctagggttgttcggcttcgtcggcatgatggggctgcttgaaaagtccaatgccgatgcgctgtggctcggctacgtcttcctcttcatcaccatcgcgatctatgcctgcatcggcctgatctgccgcacctctgacctgaacgagtactacgttgcctcgcggcgcgtgccggcgctgttcaacggcatggcgattgccgccgactggatgagcgcggcgtccttcatcggcctggccggcatcctgtttgcctcgggctacgaagggctggcctatgtgatgggctggaccggcggctactgcctggtggccttcctgctggcgccgtacctacgcaagtacggcggctacaccattcccgatttcctcgcggcgcgctacggcaacggcaagcccggcggcaacctgccagtgcgcgcgatcgcggtgctggcggcctcgctctgctccttcgtctacctggttgcgcagatccagggcgtggggctggtggtgacgcgctttatcggcgtggagtttgccgtcggcatcttcttcgggctggccggcatcctggtgtgctcgttcctgggcggcatgcgcgcggtcacatggacgcaggtggcgcagtacatcatgatgatcgtcgccttcctggtcacggtatcgatgatcgcgtggaagcatcaccacgaagcgttgccgcagctcagctacggcacgctgctgtcgcaactcgacgcgcgcgagcagcagctggagcgcgagccggccgagcaggccgtgcgcgagtactaccggcagcaggccatcctgctgcaggagcgcatcgcccggctgcccgattcctttgcccaggagcgtgacgcgctcgacgcgcggctgcaggacctgcgcacgcgcaatgccccgctgcgcgacatcaagtcgctggagcgcgaacggctggaattcccgcgcgaccccgcggcggcacagcagcagtggaaccagcagcgggcagacgcactggcccgcagccgccattcgctgtcatcgaccgaaccctatcccgcggcatcggagcaggagcgcaagaccaagcggctgaattttgtcctgctggtgttctgcctgatggtcggcaccgccagcctgccgcacatcctgacgcggctctacaccaccccgtcggtcaaggaaacgcgcaactccgtggcctgggccgtgttcttcatcgccttgctgtacgtgtccgcgcccacgctggcagcgttggtcaaattcgagttcttccagcacctggtgggaaccccctacgccgaattgccgcagtgggtggtgcaatggcgcaaggtcgatccacccgtgttcggcatccgcgatgtcaacggcgacggcatcgtgcaatgggccgagatcctgctccagcccgacatgatcgtgctggccgccccggaaatcgccggcctgccatacgtgatctccggcctgatcgccgccggcgccctggccgcggcgctgtccaccgccgacggcctgttgctgaccatcgccaatgcgctctcgcacgacgtcttctatcacatggtcgaccgccaggcgagccaccagcggcgcgtcaccaccgccaagatcgtgttgctgggcgtggcgctttttgcctcctacgtcacatcgctgcgccccggcaatatcctcttcctggtcggcgctgcgttctcgctggccgcctccagcttctttccggtactggtcctcggcatcttctggcgccgcaccaccgccgccggcgcagtcgccggcatggccgccgggctgggcgtggcggtctactacatcatcgtcaactacccgttcttcacccgcatgaccggcatcttcggcaaccgctggttcggcgtcgacccgatcgcctccggcgccttcggtgtgccggcgggcttcgccgtggccatcatcgtcagcctgctgacgccacgcaatgcaccggtgatcgaccggctggtgagctacctgcgcaaggggtagggcgaatggggttgtcaagtaaggggggatacggcgacgaggcactggattcgccaggcaactctgctataatctcggacttcccggagagatggatgagtggtttaagtcgcacgcctggaaagcgtgtataggttaatagcctatcgggggttcgaatccccctctctccgccagaacactatgcaaagcaaagccgcccgcctgggcggcttttttgtttccagtctctggtggcttcgtatgcctgaagggctcaaagaaaagccctcggccagggtaggcgagggctgaagtagtagtgggcgagtcgcgggatcgcccgtgagcgatggtcgtataggaccttgtatcgcgcatccctctaaatagaggtgttgccgcaaggcgacatggctatgccagccatctcggcgccggattggctgagcgtgccaagccagtcgttctgtccgccaagttttagtgtccgtgagagggcttccgccatttacccggtgcccggtatcctcccggccatgaccaaactcaccttccaactcgaaatccgccccgccttgcccgcagacgcgcaagcggtggaagccatcctgaccgacacctacctcggcacctggaagccgcaattgacagccgccgcggcagctgcctttgaacggcaaggcaagacccgaagctacgtcgaagcgcgcctgcaagcattccgcgtagcctgcgtggatggcgtgcccgccgcgatggtggattgggaaaacaattttgtctgggccctgcatgtcgggcgggcatggcaacgcatggggctgggcggggcgctgctggcccatgccgaaggcgagattgcccgcgccgggcattgcgaggcgaggctggagacggacacattcaacgtgcaaagccgctcgttctaccggcgccatggttatgccgagatcgatttctatcccgacgaaagctgggacagcggctttaccactgtgctgctgtcgaaagcgctgccgccagcctgagcctgcgcgccggcgccggcttggcacgggtagccaacctcatgcgcaaattgcatgaacctgtgtgcctgcccgtgaaagaatcaggcatctatttcgaatctatggcacttgccccaatgtccgaacccatcgttcacctcaacggcaccctgacccctctctccgaagcccgcatccccgtcctcgaccgcggcttcatctttggcgatggcatctacgaagtcatcccttactacaacggcaagccattccgcgcggaccagcatctggcccgcctgcaccgcagcctggagggcatcgggattcccgatccatacagcgccgggcagtggctggagctggtcggcgaggtggtcgaggccaacggcctgtcggaccagctggtctacatccaggtgtcgcgcggcgtcgccaagcgcacgcatgcgtttccgaaggaggtcgtgccgacggtgctgatcatgaccaacccgatggcgttgccgtcggcgcagatgcttgagcagggcgtggcgtgcgtgacgatggaggaccggcgctggctgaactgccagatcaagtcgacgtcgctgctgggcaacgtgctggcggcgcagcatgcggtggagcacggcgtgatcgaggcgatccagttccgggatggctggctgaccgaggcgtcggcgtctaatgtgtgggtggtgcgcgatggccgcgtgatggcgccgcccaaggacaacctgatcctggaaggcatccgctacgggttcatggaagaggtctgtgccgcgctggggattgcgctggaggcgcgccgcattgcgaaggaagaggtgttcgccgccgatgaggtgatgctgtcgtcggccagcaaggagctgctgccagtggtgaccatcgatggccgcgccatcggcaagggggtgccggggccggtctttggccggctttacgctgcgtaccaggctgccaaggctgcgctttgagctgatttgcgtgcgtgctaggatgcctcgggatcgatcgaggagtcagccatggccaagcgtgagcgtggccggcgtgccctgcaggacgaggtgagccggcgcatccagcaaatctatgaaatcggcgaggacggcgccaaggtccgggtgccggcgcctgtgccgcacgcgcgcgatgcgcgcgggcgcaactggaatatgacgggcttcggcaatgcgtccggctacgaggccagcatccgcgcggtggtcgacaaggtgcgcgacgagttcgacctgagcgacgcgccggagaaccgcgcgcccaatccgttcggggactgaagcgccggccgtcgtcctactcgaccgatacgacgatggcgacgcgccggttctcgctgcgtccggcggcggtgcggttgtcggccactgggcggctcttgccccgtccgcgaacttcgatgttttccggcgcaaagccggcgcccgccagcagccttgccaccgcttcggcgcgccgcactgacagcgactggttgtattcggccgagcccgcgtcgtcggtgtggccatccacgcgcaggcgctcgatgcccgcgcccttcagcgcccgcccgaggcgctgcacattggcggcgcgctcagcgtcgatcaggtcctcattgaatccgaacagcagcttgtctgacaagccgagttcccagccttcatcggtcagggcgaagccttcctgcttcagcaccgcgacctgggccggagacagcccggtggcgggcggcgcggtctggcagccggccagcgacagccccgccagcacgacggcggcgagccagagtttccacagggacttccagcagggcggggtcaggcgttcgggcatgcgggttctcattgcgtgacgtccaggcgcggctcggcgctttgccaagtgccgccggagcgccgcttggcgccgtacatggcggcgtcggccgcgtgcagcagcgcctggctgccttgcgcgtggacagggaagacggccaggccgatgctgagcgacgcctgcaccgtgctgccgtcgggcaggtcgatcggggcggacatcgcctgcaggatatgctcggcgatatggatggcgtcgcgcggcgcgcgcagcgctgcggccagcacggcgaattcgtcgccgccgatgcgtgccacggtgtcgccggcgcgcaggctggcgcggatgcgctgggccacggccaccagcacggcatcgccggcggcatggccgtggcggtcgttgatgttcttgaaatcgtcactgtccaggtacagcacggccgcgtattcgtcgttggcagcggcatggcgcacagcgtgctccagcgcttcgacgaaggcggcgcggttgagcaggccggtcagcgcatcgtggttggcgcggtgggcgagcgagcggttctcgtgctgcatctggttctgccaggtctgcagttcgtccagcaggccgttgaagtcctcgctgagggcattgagttccgcgatgctggccggcggcgtgcgctgcgcgaaatcgcgcttggaacgcaccgcgtgcgccacgcgcatcaggttgcgcagcggctcgacgatctgcaccagcagccggctggccaggtagtgggcgccgacggcggtcagcagcaggcagccaagcaggccgagcgcgccgcgcagcaggaaatgcagcaggttgcggggatcgccactgacgcgcagcatgccgacctgttgcgtctggtgcaggatcggttgttccacgacccccatgctcagccactcgctcagcacgtggcgcaagccggtcagtggcgcctggccggggcgctgccattcggccagcacgtggttgccgtggtcgtagacggtggcgcgcgcgatgtcctcggacgcggcgatggccgccagtgtctcgccggtggccgcctggtcgcggaatacgaccggcgcctccagggtgtaggcgatcgagcgggccaccagccgcacgttgtggtcggcatagacgcgcagtgcggtcaggccgagggcggtcagcgataccccggcagtaaataccgcgatcagcgccacgcccaggtggatccggcgcagcacgctgtagagggtggggcgggcgccgttgccgcgcgccggctggtgggcgctcatgacggcgctcccttgcggcggcccagctgcagcacgccggggtgcacgtgcacgccgctgcgggcgagcgtgtcgaggttgacgcggaacgagacctgctggtcgcggatgttcaggcagaacatgctgccgacctcgcactcgaagtcttcctcggcgatcaccagcacagggcggccggtcagctcgcccgacagccgcttgcggcgggcttcgttcatggcgccgatgtagagggcatcgcaggccggatgcagcatgtcggccagcacgtcgacctggcgcgcgcgcaccgggcgaccgttggcgagcgtgccgccttccatcagccgcgcggagtagcggctggtgctgtccacgcacagccgcaccgggtcgcgctcaaccggccagcgtgcataccccagcaggctgaagaccacgcgcgcgaccaggtcggtgcgctgcggcgcgggctgcgccgtcaccgccggcggcagcatggccggcagcaccgccagcgtcacggcgagcagggccggcagggcgcggcgcagcagcggtggacgtcgggtggaatcggcactgggaagggcgctggctggggcaggagccatggtctgggaaaggaggttcggtacggcctgtatggatggtgggctggccgcagccgcggttattgtccgggggctggttccgggcggtcaagcgtccggcacgggcggaatccgccccggaacccgcttgtgcgggcatgcttgcgtggggcccgtttgcgacgcggcgtgatacggaatgtttaacggttttgggtcgttttcctgaagtcacgcgggaacgcgcgcagcgcttcgccgtggcgggcacaacacttagaatgggtccatcgtccccaacgcgcgcctcgccgccgcatgccgccatgattgccgacccgcttttccgcttcctgcacgttgccggcgttgccgtctgggtgggcggcatgttcttcgcctacctgtgcctgcggccggtggccggcaccgtgctggaaccgccgccgcggctgcggctctggcgcggcgtgtttgcccgcttcttcccgtgggtatgggcggcggtgatcgcgatcctgctgagcggtgcggcgatgatggcggcagtgggcatgtccgctgccccacgcaactggcacctgatgatgggcgtcggcctcgtcatgacggtgattttctgctacgtgtggtttgggccgtatcgcgtgctgggccgggccgtggatgcccaggactggccggccgccggtgccgcgctgaaccgcatccggcaggcggtggggaccaacctggtgctcgggctggtcaatatcgccgtggccacgctggggcgctggctggcctgagcggcccgatgccccggcatggccctgcatcgtcgcgtcaccacctggcaatgggagagccgttatgcgcgtcatcgcatgtcttgccgtccttggccttgcaatggcgggcgcaccggcccgcgccgagcaaggcaatggcctgagcgctgaatatgaacgctgcatggccaaggccatctcgactgccgacatcctcggctgcgctgcggtcgaaacacgggtccaggacgtggcgctgaacagcgcctatcaaggcttgctgcggcggctggaagcgccgcgcaccggccagttgcgggtggcgcagcgtgcctggctggaattccgccaggccaattgcgcctatgtggccaatccggccggcggcacggccgcgcgcgtggccggagcgacctgcatggcccgcatgagcgccgcgcgggtgcgcgaattgcgtgacttcgccaccgaggccgccgcccggtgagcgggcgagccatgtgctagagttcccagacacctgtgctgcggcacgtctcaccaggagatggatcatggcaagtgaatcgcggaacaacctgaaggcctttgtgcaaacggcgccccaggcggggcgctatgtgtgggtcatcgcgctggtggacttcggcgcgcagcagatccggcgcgccatcgtctcggacgacaccttcaccacctcggatgccgcgcgggtagcgggcgaggcccagctcaaggcgatggccgaagaccactaggctgggccagtgttgcgcgccggcatctttgtgatcaacggataccgtttcttacattgcgccgggatcggtgcgcgctagactgtgggcatgttcctccacaagaaaggactcccatgacacatcgcgcgctccggccggccaaggtcctcctgctggcggccctgctgggttccggcctgacgttcagtgcggcgtcgatggcccaggtgtcggtcaatattgccatcggcgtaccaccgccggccccgatctacgaggtcgtgcccgcaccgcgctccggctatgtctggatgccgggctactgggactgggatgatcaccaccacaagcacgcctggaagaaggggcgctgggaacgtgaacgccccggctatatctatgagtcgccgcgctggatccagtcgcgcgacggctgggtgctggtgccgggtcgctgggaccagggcgggtacaaggacaaggggcagaaggataagggccacaaggacaagggctatcactgcccacccggccacgccaagaagggcgagtgctgaggtgccggccaccgggcgcagcacggtgacgccgggtggccttgccatgctacgatcgccgccatgacaaccgcgcccacgcggcacatcggcggcggataccggaggtagcaatggcaaagcacgttttcacgcgcgcgcagtatctcgacatcctcaatgacagcctgcgcaagcatcccggctggcagcccggcatggcctttgtgttcctgccgcctggcgccgatgccagccaggccacggccgtgggctgcaccgggccgatggaggccattcctgtctatgcggaaatccagcgggtggctgccgaactgatcgaagtcggcaacgaatagcggcgccggtcgcgttgcggccggtgggtgccgcgagtgcgtacaataccggcctctacagactttcggataatgccgtgaagaaaacggacctggaaaaaaacaagggcctgaagatcgccaacagcctgaagcaggcttcggcgggccggggtattcccggcggcgctgcgcgcccggaccggcgcgaacagcgccggctggaccaggagcaaggtctggtgccctttgcgtgcaagctggacggcacgctggtcaagcgcctgcaagcgcttgccgtggatcacccgggtggcatgaccgggctgctcaatgagctgctggcgggcgcgttgccgccggagcagggccagagctgaaatatggtggccgcgcccgcggccacctgcctgaccccatcaggtcgcgagcgggtcagtcctcttcttcgtcaaggaattcgcggcgcagcatccagttggcgatggcttcgtcgcagatgcgcttgaatttctgcttgtccggcatcttgtcgaacagctggaaattgaccagcgccatgccggcatcggtgatatagaacatccggctcggatcgtcttcatggacgatgcggccatcgatggcgtcttcctcgctttccgccggcatgtcttctagctcgaccacgcggcaggtgaagcgcgggctgcgggtatgggtcagatactcgaactcgtcgtgcatgacctcgccgcctttgcctgcgataacggcgaagccccagataaagcggggcatcggcagatcggacagatcttcaatctcgtccatggtgttctccctgattcaatccccgcattatcgcccggaacgccgccacctcaaacgttgacgtggcgcttagggctttgcctggcagttggccagcgccggcgcggcgttttcggcctgcatcaggtcgcgcagcgtgccttcctcgcccttggtccaccattcgtagcggccgccggcatagcgcgcgccggaggccgacacggtgctgaccgccagcacgggcttgccatcgatgcggaacaccgccgcctggttgtccggactgttgaaatagcgcacggaaagcgtcttgccgccgtcgcactggtagcgcacggcgcgcacgtccgggaagcgcacgccgtcgatgccgggcgcacgggcggcgtgtgccgcggcgcatgcgccgagggttgcgagcagggccacggcgcgggcgcaggacaggatcgggcgagtggtcatggctttgccttggtcgatgggtggactgtcagccagttgagaggggcggcgccagcgtccgggtcagccgagcatgtagccggcggcgagcgtgcggaaactctcgatttcgcgcgcctgccaggcctcgtcctcgccgagttcctcggccagaatagcggccacggccggcgcggcgtccacggcggcgcgcgcgtccaggaacagcgcgcggttgcggcgggccagcacgtcctcgacccggcgcgccagttcgtgccgggccgcaaagcgcacgtgcgcttcggtcaggcctgacgccggtgccagcatgcggtcatatccgggcagcgcgcgcagcaggtccagctcattgccgtagtagcggtccggcgagcctgaatccggcggcggcagcccggccggcagccccgccgcgccgtgcaggggcagctcggcggtcacgcacggggccgcgcgcaccatctggcgctggatcgcggtctcgatcacgtcttcagccatcttgcggtaagtggtccacttgccgccggtgacggtgatcagcccggccttggacaccaggatcgtatgctcgcgcgacagcgacgcggtagaggcctcgccggtggcccgcaccagcggccgcaggccggcccagacactggtgacgtcggcgcgggtcgggtccctggcgaggtagcgcgacgcggtttccaggatgaagtcgacgtcgtcggcgccggcgtctggttccagcggcaggtcgcggcgcggggtgtcggtggtgccgacgatggtgtggccgttccagggcaccacgaacagcacccggccgtcgtcggtcttggggatcaggatggcgcgctcgcccggcaggaagctgcgcggcagcgtcaggtgcacgccctggctgggcgcgaccatggcgcgcgcgtggccgtcttccatctgccggatcgcatcgacccacacgccggtggcgttgatcacgcagtcggcgcgcaggtggaaggtggcgtcgccgagcacatcctgcacggtcacgccgctgatcacgccgccttgctggctcaggcccgtcacgcgcatgtagttgagcgcggtgccgcccacgtcgaacagcgtgcgcatcagcgccaccgccagccgcgcatcgtcgaactggccgtcgaaatacaggttgccgccgcgcagcggacgcccgccgacgtgctcggccaggttgggcgccgcggccagcacctcgcggtggttcagccagcggctgccggccaggttgaggtcgccggccagcatgtcgtagaccttgaggccgatgccgtagaagggctggtcgaacagctggtaggccggcaccacgaagcccagcggccacaccaggtgcggcgcgttgcgcgccagcaggccgcgctcgtgcagggcctcgcgcaccaggctgatattgccctgggccaggtagcgcacgccgccatgcaccagcttggtggccttgctggaggtgcccttggcaaaatccgcggcttcgaccagcagcgtgcggtagccgcgcgaggcggcgtcgactgcggtgcccaggccggtggcgccgccgccgatgacgatcacatcccagcgcggctcgcgctccagggtggcgagcagggcggcgcggtcggggggctggatcggggtggagactctctgcatgacgcttttcttgggggtgtgttcggggtgggccggcgctcaggcgtggctgccgctggcttcgtcctcgcgcgcccagtcgcgcgcgcggtcgactgcgcgatgccagcgcgccagccggtggccgcgcgcgtcagccgacaggttcggctcaaagcgccgctccacctgccattgctgcgcgatctccgccggatcgctccagtaaccggtggccagtcccgccaggtaggcggcgcccagcgcggtggtttcggtcacgcgcgggcggaccaccggggtgccgagcaggtcggcctgcatctgcatcagcaggtcgctgcgcgaggcgccaccgtccacgcgcagttcggccagcgagatgccggcatccttccgcatggcttccagcacgtcgacgctctgcagcgcgatcgattccagcgccgcgcgcgcgatctgcggccggccggtgccgcgcgtcatgccaaccagcgtgccgcgtgcaaacgggtcccagtgcggcgcgcccaggccggcaaaggcgggcaccagcaccacgccgccggtgtcgtcgcactggcgcgccagcggctcgacctcgggagcgctattgatgatcttgaggccgtcgcgcagccactggatggtggcgccgcccatgaacacgccgccttccaggcaatattgcgtctggccgcggatctgccagccgatcgtggtcagcagccggttgtgcgacgtgaccggctgcgagccggtattcatcagcaggaagcagccggtgccgtaggtgttcttggccatgcccggcgacaggcaggcctggccgaaggtggcggcctgctggtcgccggcgatgccggcaatggggatctgcatgccgaacagccgcgccgaggtgcgcgccacctcgccgctggacgccaccacctcgggcagcagcgcgtgcgggatgtccagcagcgccagcagcgcatcgtcccactcgaagttgtggatattgaacagcatggtgcgcgaggcatttgacacatcggtgacatggcgcgcgccgtcggtcaactgccagatcagccagctgtcgacggtgccgaaggccagctcgccgcgctgggcgcgttcgcgcgcgccttcgatgttgtcgagcatccagcgcagcttggtgccggagaagtaggcatcgatgatcaggccggtcttgtcgcggaacagctcgccgtggccggcggcctgcagcgcctcgcacatgggcgcggtgcggcggtcctgccagaccagcgcgcgcccgaccggctcgccggtcttgcggtcccacagcacagtggtctcgcgctggttggtgatgccgatggcgcgcacctgcgcggccgagatgccggcatcggacagcaccgcgtgcgccaccgccagctgcgattgccagatctcgtaggggtcgtgctcgacatggccgggatgtgggtaatattggcggaactcgcgctgcgcgagccgcaccacattgccggcatggtcgaacaggatggcccgcgagctgctggtgccctggtcgagcgccagcacatattgcggctcggtgggaagctgggacgatgcagggcgctgggcctgcgcggctggctggttcatgcgttcaatcctgacaatgacaaagcacgccggcccggccggcgcatggattcctgatggctgaaacgtcttccttgccgcccgcggacgccgcaggcaacttcgccgccgatcccgccgcgcagatcgccgcctcgctggcggcgcgcagcggcttcgacgccgccgccaagctgcgcctgatggcggcaggccagcaggttggctggctgccgcgtgcccatgcggcaatcttgcgcggtatgggcgccatcctcggcccggacgagcgcctggccgatggcaccacggcggcagaactgctgcccgggcgcaatgacttcgacgcgcgcagcgccgcgctgcaggcgctggcccgccagctggccgatgccggccatgtgcgcggctggcgtgacgaactgttcgcggtcacccctgcgcaggacgcgcccgcacttgccgtggtggagcgcgcggcggcgcgctttctcgggctgctgacctttgcctcgcacatgaacggcattgtggatggcgatgtcgacggcggtcccgccctgtggatctcgcggcgcagcccggccaagtcggtcgaccccggcatgtgggacaacctggtcgccggcggcatgccgcacggcagcgatccgctggcgacgctggtgcgcgaatgcgaggaagaatccggcatcccgcccgcgctggcgcagggcgcgcaggcccacggcatgatcgaggtgctgcgcgacctgcccgaaggcgtacagtgggagcaggtctacgtctacgacctgctgctgccgcccggcttcacgccgcgcaaccaggatggcgaggtcagcgagcaccggcgcgtcgatgtggccgcattgcttgctatcatgtcggccggcgccatgacggttgatgcgacactggtgacgctggatgcccttgggcggcgcggctggctcggtcctgaccatcgcgcctgagccgtcgccgcgggttccgcctgtgccggtcttgccgaccgcgctgacctgatttttccggccttgcgccgcgccactccgacagaacaacacaccatgagcaacaccggattcatcctgaccctctcgtgccctgaccagccgggcattgtccatgccgtctcgggcctgctgttccagcacggctgcaatatcgtcgattccgaccagtacggtgacgagtacgccggccgcttcttcatgcgcgtgcatttcacgccggccgccggcggcccggacctggacacgctgaaggccgcgttcgcgccggtgggcgaccagttcagcatgcagtgggagctgaacgacgccgcggtcaagccgcgcgtgatgatcatggtgtccaagatcggccactgcctgaacgacctgctgttccgcgccaaggtgggcggcctgccggtcgagatcgcggccatcgtctcgaaccaccgcgacttctaccagctggcggcatcgtatgacgtgccgttcttccacctgccgctgatgaacgcctcggccgagcagaaggcagcgcaggaagcgcgcgtgttcgacgtggtgcaggagcagaagatcgacctggtggtgctggcgcgctacatgcaggtgctgtccgatgacctgtgccgcaagctggccggccgcgcgatcaatatccaccactcgttcctgcccagcttcaagggcgccaagccgtactaccaggcgcatgagcgcggcgtgaagctgatcggcgcgaccgcgcactatgtcaccgccgacctggacgaaggcccgatcatcgagcaggagatcgagcgcgtggaccacagcatggacccggagcaactgaccgccgtcggccgcgacgtggaatgcgtggcactggcgcgcgcggtcaagtggcatgccgaacaccgtatcctgctgaacggccacaagaccgtggtgttcaagtaattctctgcccgaccctcggtgttcgcccctctcccgcttgcgggagaagggccgggggagagggctggcctgtcgcaagagcgaggcgccgggcatcaccgccagcaaggcagcctcaagccggtccccggcgcgctcactcccgctccgccaccacacacttcaccccactgtcggccacgatctggtcgaacggcgctgccagcggctcgtcggtaaagagccggtcgacctgcgacacatgcgccagctccaccatcgcctggcgattgaacttgctggcgtccgccgccagccacacctcgcgtgaatgctcgatgatggtccgcgccaccttgacctcgcggaaatcgtagtcgcgcagcgtgccgtcggtctcgatgcccgagatgccgatcagcccgatatccaccttgaactggcggatgaactccaccgtggcctcgcccacgatgccgcggtcgcgtgagcgcagcacgccgccggcgacgatgacctcgcaatcggggttgtcggcaaggatattggccacattcaggttgttggtgatcacgcgcagcccgcggtggtgcatcagttcgcgcgctatctcttccaccgtggtgccgatgttcaggatcagcgagcagccctcgggcaccgcagcggccaccgcgcgcgcgatgcgcgccttgccctcggcgttgagcacctgccgctgccggtaggcgatgttctcggtggtggagccctccacccgcaccccgccatggaagcgcgccagcatgccgttcccggccagcaggttgacatcgcggcgcaccgtctggagcgtgacgccgaatttgcgcgcaagttcgtcgatggaggcaaagccctgggtgcggacttcttcgagcagggccgtctggcggggattcagggtcatgccgggattctagttcaaacagaaacgaaaacaaatgatgcagtgcactattgttttacgttcgttttgttgctaaaacgaacgtcaagccaagacttttgtgcctgcatcgcgcgccaaagctgtgctgcgggaagcatatcgaacatggagaccggatgcagctacgtttggaaggcgtcgcacagcaggcaggttcgcaggcgtatctctttccgatgacgctcgcgccggttccgggcgcggtgaccatcctgctgggcgcgacgcaggcgggcaagacctcgctgatgcggctgatggccgggctggaccggcccagcgccggccgcgtgctggtcgacggccatgacgtgaccggcatgccggtgcgcgagcgcaatgtatcgatggtctaccagcagttcatcaactacccgtcgctcaaggttttcgacaacatcgcctcgccgctgcggctgctgcgcaaggcgccggccgcagagattgccgcgcgcgtgcgcgagctggccgggcggctgcatatcgaccacctgctggaccgctatccgtccgagctctccggcgggcagcagcagcgcgtggcactggcgcgtgcgctggccaaggaggcgccgctgatgctgctggacgagccgctggtcaaccttgactacaagctgcgcgaagaactgcgcgaggaactggcgcagctgttcgcgcatggcgacgccaccgtggtctatgccaccaccgagcccggcgaagcgctgctgctgggcggccataccgcggtgctggacgccggcgaactgctgcagtacggccccacgccccaggtcttccactaccccgattcgctgcgcgtggcgcgcgctttcaacgatccgccgatgaacctggtcgagggccggctgcagggcggccgggtcacgctggccggcgacatctcagtgccggtgcccggcgcgggcgggcacgacggcccggtcacggtgggggtacgcgcgtcggcattgcgcctggccggtgagccgggcgcggtggcggtgccggggcgcgtggcgctggccgagctgtccggctcggacaccttcgtccacgccgataccccggtgggcaacctggtggcacagttcgccggcgtgctcgacctggcgctgggcgagccggtgtcactgcacctgctgcccgagcagatctatctgttcgacgccgacgggcgccgcatccatgcgccgcgccggccgggcgggctggcggcggacgtgcccggcggcgcggccgcggctgccggggcaggggcctgagatggcgcgcatcgacctggacctggcgcactcctatgtgccaaatccgcgtaccgacgaggactacgcgctgctgccgctgcaattcacgttcgaagacggcggcgcctatgcgctgctgggcccgtccggctgcggcaagaccacgctgctgaactgcatttccgggctgctgcggccctcgcacggcaccatcgccttcgatggccgcgacgtgaccgttgccacgccgcaggcgcgcaatatcgcccaggtgttccagttcccggtgatctacgacaccatgaccgtcggcgagaacctggccttcccgctgcgcaaccgcggcgtgccggaagcccaggtgcgcgagcgggtagggcgcgtggccgagatgctggacctgtcggccacgctcgatcgccgcgccagcggcctggccgcggacgccaagcagaagatctcgctggggcgcgggctggtgcgccaggacgtgtcggccatcctcttcgacgagccgctgacggtgatcgacccgcagctcaaatggcagctgcggcgcaagctcaaggaaatccaccacgaattccgcctgacgctgatctacgtgacgcacgaccagaccgaggcgctgacctttgccgaccaggtggtggtgatgtcgcgcggcaaggcggtgcaggtggggccggcggatgcgctgttcgagcgtcccgcgcataccttcgtcgggcatttcatcggctcgccgggcatgaatttcctgaccgggcagtggcgcgacggcgcgatcgagctggcgggtcgccgctacatgccggagttgtcgccgtcagttgaagcggcgctgcgcgaggccggcagcttccgcatcggcgtgcggcccgagtacctgcgcctggcgccggagagcgacgcgcaggcggtgccggtgcgggtcgagcgcgcgcaggacatcggcacttactggctgctgaccggcggagtgcaggaggcgggcgcactggccggtacgctgcgcgcgcggctgggtatcgaggcggccgatctgcgcctgggcgacacggcctggctgtcggtgttcaaccgccatacctgctactacgtcaacgaggaactggtgccatgaagcccgtcaaccagaaggcctggctgctggtgttgccggtggtggtgtgcgtggcgttctccgcgatcctgccgctgatgaccatcgtcaactactcggtgcaggacatcatctcgcccgagcggcgcgtctttgtcggcaccgaatggttcggcaccgtgttgcgcgatggcgagctgcacgacgcgctgctgcgccagctgggcttctcgctggcggtgctgctggtggagatcccgctcggcatcctgctggcgctgtcgatgccggccaggggctggaaggcatcaacggtgctggtgatcatcgcgctgtcgctgctgatcccgtggaacgtggtcggcaccatctggcagatcttcgggcgcaccgatatcggcctgctcggtgccgctctcgaggcgttggggttcgactacaactacaccggcagcgctttcgatgcctgggtcacggtgctggtgatggacgtctggcactggacgccgctggtggcgctgctgtgctacgccggactgcgcgccatccccgacgcctactaccaggccgcgcagatcgacggcgcctcgcgcctggcggtgttccgctatatccagctgcccaagctgcgcggcgtgctgatgatcgcggtgctgctgcgcttcatggacagcttcatgatctataccgagccgttcgtgctgaccggcggcggccccggcaacgccaccaccttcctgtcgcagtacctgacgcagaaggccgtgggccagttcgacctgggcccggcggcagcgttttccatcgtctatttcctgatcatcctgctcatgtgcttcatcctctataactggatgcagcgcgcgggcaccgccggcagcgaggacatgccccatggctgagatgcgcccccccgccaaccgcgccacctggtggcgcgccggcttcctgctggtctacctgctgttcgccatcgtgccgatctactggatggtgaacatgtcgttcaagaccaacgaggagatcgtctccacgctgtcgctgtggcccgcggaattcacgctgcagcattacaagaccatcttcaccgacccgtcctggtattcgggctacgtcaactcgatgatctacgtggcgatgaacacgatgatctcgatcagcgtggcgttgccggccgcctatgccttttcgcgctaccagttcatcggcgacaagcatgtgttcttctggctgctgaccaaccgcatgacgccgcccgcggtgttcctgctgccgttcttccagctctacagcaccatcgggctgatggatacccacctgggcgtggcgctggcgcacctggtcttcaacgtgccgctggcggtgtggatcctggagggcttcatgtcgggcgtgccgcgcgagatcgacgagaccgcgtatgtcgacggctactcgttcccgcgcttcttcctgaccatcttcctgccgctgatcaaggccggcgtgggcgtggcggcgttcttctgcttcatgttcagctgggtcgagctgctgctggcgcgcacgctgacctcggtcaatgccaagcccatcgtcgccaccatgacgcgcacggtgtcggcatcgggcatggactggggcgtgctggccgcggccggcgtgctgaccatcgtgcccggcggcatcgtgatctggttcgtgcggcattacatcgcgaagggcttcgcgatgggtcgcgtgtaagcgcgcggcgcaaccctgatcacaacacaaggagacggcgcaatgctgagctggatggtctggacgataccggtggcggtgttcttcggctgcatcgtagtcatgctgatcaccatgactatctgggaaatacgcgcgccgtcggtgctgcgcaagggcttcctgccgatcgcgaccacgcgtggcgaccgcttgtttatcgggctgatgtgcgccgcctgggtcaacctggcgtgggtgggactgggcgagaaagtcaccgcttggctgtcgctgcccgaagagccgtcggtctggatcagcttcggggtatcgatgctggtgctggcgctgatcatgcgcaagggctagccgtttattcgcaggcatcagggttaaatggaaggtttgcggcttatccctgccccggggccgccaccacgaccacagccggggaggggaaatcttgaggagacactgatgaatgtgcacgtgaagttggggatgtcagcccttgcctgcgcggctgcgctggcttgtgggtccgcctcggcgggcgaggctgaggccaagaagtggatcgacaatgagttccagccctcgtcgctggccaaggacaagcagcaggccgaaatgaagtggttcatcgacgccgccgccaagctcaaggccaggggggtcacgcagatcagcgtcgtgtccgaaaccattaccacgcacgagtacgagtccaagacgctggccaaggcgttcgaggagatcaccggcatcaaggtcaagcacgacctgatccaggaaggcgatgtggtcgagaagctgcagacctcgatgcagtccggcaagtcgatctacgacggctggatctctgactcggacctgatcggcacgcactaccgctacggctcgatcttgccgctgaccgactatatgaacggcgccggcaaggagtggaccaaccccgggctggatgtgaaggactttatcggcaccaagttcaccaccgcgccggacggcaagctgtaccagctgcccgaccagcagtttgccaacctgtactggttccgcgccgactggttcgcgcgcaaggacctgcaggacaagttcaaggccaagtacggctacgacctgggtgtgccgaccaactggtcagcctatgaggacatcgccaacttcttcaccaacgacgtgaaggagctcgacggcaagaaggtctacgggcacatggactacggcaagaaggatccgtcgctgggctggcgcttcaccgacgcctggctgtcgatggccggcaccgccgacaagggccttcccaacggcatgccggtggacgagtggggcatccgcgtggccgaggacaagtgcacgccggtcggcgcctcggtgtcgcgcggcggtgccaccaacagcccggcggcggtctatgcgctgaccaagtacatcgactggatgaagaagtacgcgccgccgcaggcgatgggcatgaccttctccgaggccggcccggtccccgcgcaaggccaggtggcgcagcagatcttctggtacaccgccttcaccgcggacatgaccaggaagggcctgccggtggtcaacgccgacggctcgcccaagtggcgcatggcgccgtcgccgtacggcccgtactggaagcagggcatgcagaacggctaccaggacgtgggctcctggaccttcttcaagaacaccgatcccaacaagctggcgggcgcctggctgtatgcgcagttcgtgacatccaagacggtctcgctgaagaagtcgctgaccgggctgacctttatccgcgacagcgacatccaccacgactacctgaccaggaacgcggccaagtacggtgggctgatcgagttctaccgcagccccgcgcgcgtggcgtggacgccgaccggcaccaacgtccccgactatccgaagctggcccagctgtggtggaagaacgtggccaccgcggtgaccggcgagaagacgccgcaagccgccatggacacgctggccgaagagatggaccaggtcatggcgcggctgcaacgcgccggcatgagcaactgcgcgcccaggctcaacccgaagggagacccgggcaagtggctgtcgaacgaccatgcgccgtggcagaagctggccaacgaaaagccgaagggcgagaccattccttacgacaagctgctgcaggcgtggaaggaggggaaggtgcgctgaggcgccgaggcgttgatgctgccggcgacggttgaatgccttacgtggtcaagtccgatgtttccgattgggcctctgccgccgcctgcaccgcataacgcgccttgccgtgccgcttggcctcgtacagcgccatgtcggcgtgcatgaacaactcgctcgcggtcatggtgtggcgcgcgtcatggatggccgagccgacgctggccgaggccgccagcgtgtggccatcgatcacgaagggcatgcgcgcggcctgcacgatggtgttggcgatggatgccatggcctggcggtcggcaacgccgtccaggatcaccgcaaactcatcgccgccgatgcgcgcgaccgcgtcgcccttgcgcacgcaggcgcgcagccgctgcgcaaaggcgaccagcaactggtcgcccaccggatggccaaagctgtcgttgacgcccttgaagtcgtccaggtccaccagcagcagcgccagcgagcgcccgtcggcgctggcgcgggccatgcattcggccaggcgccggtcgaaacccttgcggttgagcaggccggtgaggtagtcggagatggtctgtgcttccaggctgcgcagtttttcgcgctcatgggtgacattgcgcccgaacatgtgcaggccgatgacggtatcctgcacatcgttccaggccggctggcaggtgatctccatgcattcggtgccatcagcgctttcacgggtgaacgtcaccgcgcgcccggcgcaggcctgctccaggtacggctggcaggccaggtattcctgcgtgccccacagttcgcgcagcgacagccccacgatctgctgcgccggcacgccatagcgctgcgcataggcctggttgacgaagacgtagcgctgctgcatgtcgatgaacgagacaaagtccggcacatggttggcgatcgcctcgatgcgcttctcgctttcggcggcgcggtccttggccgctttcagcgcggcttcgcgctccgacagctgcgccaccacctcggcgaaggtcgcggccagttcgccgatctcgtcggcgcggccgacgggcaggtccgccaccgcggccgggttggtgccgatctggcgcacagcgcggtgcagccgctgcagcggttcaagcaggcggcgcatgaccagccacatcatcgcggcggcaagcagcatggtgatggcgccgatgaccagggtccgttggcgcaccgcgagcagcggcgcgtaggcttcggctgccggcaggaccgccaccaactcccagccgttggatgccagcagatggcgcgccacgatcggctgcgtcggcgtcaggacttccaggaaggcgggggcgtgatcggcgccgcaggcttcgccgatcgcgcgtgcggggctcagcacgcgggcagcgtccgggtgcattgcatagcggggattggtgccggaggaaaccaggcagaagctgccggtagtgcccacgcggctgtgcgcaagctcgcgcaggaagttgctgtccgcgaggttcaggacgcccccgaccacgccgcgcagctcgccacccggtccgtgcagcggcactgccagcactacgccgggggcattggtctgcttgccctggatcaggtccgacaccgcgaacgcctggccctgctggatatcgcggaaatagtcgcggtcgtccacgcgcaggcgcacgccatccggcacggcggtgctgaacaccaggtgtccgtcgggcgcggccaggaagacggcgttgaaagtctcgggcatttccaccatgccctccacggcccggcgcagttcggccggctttaccgaaagcatgggggagagctggcttgccacgcgccgcaggacggtggcgcggccctgcagcttttcatcgagctgctcggccaccatcttgaccagcgtgtcctgctgcgtctgctgcaagttcttcaggccgtcgtaggcgtagtactgcgcgtagagcgcgcgcagcacgatgatcagcgtcaccacacccgccgtggcgaacgccatccggtacttcaaagagtgctgcatgattgacttatttcttgtgcgcactgacccgtatcctcgtcccggcgcattgtgttgccgacccgagatcctgtccgggacgtgaaatcaagattagcagatgtcaagatgaaattcgcaactgtttgcaacagcgcgccagggtgccagcgcaacgtgccggccgcgctacagggaagggcctggccggtggcgagatcgccacgcgcactcatgcaccgattccgtcttggcagtagcatgcgggatggcccgcgatgtggcgggcccgtctcgcggttcctgattgcccgttcctgattcctttccagcccaaacgccaatgactacaccgactacgctgctcgacctggccggcgccagccgcaccccttccgcctgggaagccgccgtcctgatcctgatcgaccatcaacgcgaatacgtcgacggccgcctgccgctggccggcatgcccgcggccgtggctgcctgcgcgcagctgctggcgctggcgcgccgccacggcacgccggtaatccatgtcgcgcaccacggccggccgggcagcatggcgttcgatccgaccgggccgtatgccgccttcattgaaggggtggggccgcaggccggtgagattaccgtcaccaagggcttgcccaacagcttcgccggcaccaccctggccgacgaactggccaggctcggccgcaaggagctgatcgtggccggcttccagacgcatatgtgcgtaagcgccacggtgcgctcggcgctcgaccacggctatcgcagcaccgtcgtggccgcggcctgcgccacgcgcgacctgcctgacccgctgggcggccccgccgtacctgcggccgatctccaccgcagcacgctggccgcgttgaacgaccgcttcgccacggtcgtcgcggacgcaggggcctggcacggctaaccagcgacaggccaggtgcgcacgcgcagcacggtatggtcgcgcgggcgcagcgtcaattccagtgcggtcggcacgccccgcctcgtgatcggcgcgacaaagcgtgccatttccgctgctgcagcgaggcgcgtgccgcagcgcatcgccagccgcaggatatgcagcggcacgaaccgctccggctcctgcatgtccgccagcgcggccagcgtgaaatgcagtggctgccgagccagtgcgatgaagcgcccgcgcagccgcgccagcgtcgccgcgggcgccgccagtccttcgccctcggcgccgctgcgcgtcatgccgcgcgcacgcggctgccacagcgtgccggcaaccagcagcgatgcgcgccccgcgccagcttcatccacgcatgcatccagcgccacgacatggcccgtcaggtcataggtggaagccaccgaggcaaagctgcggtggtagccgatgatgcaatccatgtcttcgtcatagaccggcagcgcatcacgcggcacgcgcgccggacgcatctcgaaccagccggcactgaccgggttgcggccggtccagggcagggcgagttctgtttcggtcgcggtggggaggcagggggacggcaagtcgtgctccggtgcaggtcggagcagtcaaggtagccggcgagtgagtgggcggatatgagataagccttgtcgccggcaacggaaaggttgcgtcgcgacgtggctggggcctagaagctcacgcccagcgaaaggatcgcgacctggtccgtcgagcccgggttgaaccagtagaagcccgccgtgaacctgcgcaccgtgacctggaaaaagccgcctcgctggagttcgcggcctcccccgtagatccgggtacgttgcgcgaccaggcccagcctcagccattcgaccgggcggaagccaagttcgctccaggcgtagagatagcccggctcttcgccgcgcgcatccaggtattcggcttcgatgtagtagtcgaacttgctcactgcgacgctggcctcgattccgccgatcaggccgtgggtggagcctcccacgaagccaacgatgggggtcgccttgaactggatggtttcgccgcccgagaaagtccagccgatgaaggctgactgcgagtggactgcctcgtagttgcttcttgcctcgaggtgaagctgcttcctttcggcgatgaagatgccggagaggtagtcgccgctctggcgcggcatgttccagtagcctgttgccgagaaggtccagggcgagccggccgcctgcccggcggcatccggcgcgggctggggcggctcctgtgcctggaccgtgcccgcgccaagggcggcggcaagcagcaggatcgcgcctcgcatctcagccgcccagcgcgataatggcgatggtcatgaccacgcccagcgcagtcatggctgcgccagtgacccagccgccaaagccggcatagtggcccagcgcccacccggcggcgaacagcatggccagggtcagcccgcgcgagatcagtagcgccagtttgacatcgtccagcagtacgaacggcagtgcgaccggaaacgtggccagtacaacgataaagaagatgtgcacggcaccgatcaggtcggccatgttcaggcgggggcggggcggcagtgccggggcggcggcaagccgtgcccgcatggcttccagttccttgtcggtgaccagcgacttcgttgcgcgaggcagcgcatcgcgaatcaggccgatcgccgtggcctggtcgttagcattcctgacggcaagtgccagggagatccgctggccgcggttcgccagcgtacggatcaggaacatgaccgcgtccaccatgccccaggccaggttgcagcccagcgcggcatgcatcatggtgcggctggcatccgggccacccgtgccgctcgacaccgcgccgacaaaagtgagcgccatgaacaggccgaagcacatctcggagacgcgatccacgacgtccagcaccggctcccgtgtctgagcatcctccggcggcacggtcgcgccggcatggatcgtcgtcctgggtgaatcgggcatggcggactcccgaaagctgcgtcgatgatcggataggcgataggggctgtgctcgtgggggctgtgcctgcctggcccgtcgtcctgtggacaagtatgcgcgccagccgcaaatatgccaggcgagcattccttgattggcgtgatgaaccacggttttccggggagggtagaaaacgtgggcaaacgccgggcaacaaaaaacccagagagcttgcgctgtctgggtttcctggcaacttaggcagttgctggccatttgtctggtggtggtacagggattgaacctgtgacccctgccgtgtgaatcagaagaaggcccagctatgtgcatacagttttcctgtatgtgcttgagtttacgggattttagatgcgttgagtatcgcccgtgcgccttcaattgcgctccgcgctgcgcccattttgcgccgcatgccgtggtgagttacgaccttccggagtacttcgcgaaggacggtgaagtacgcctggattgattcgcagtgctggagctatccgctgtcggcccggcagtggcgggcgccgcgcgctgcgaaatctagcgtgggctgagggggcgaaagggactgaagcaggattattgcgcccggacggcgtcccagacgactaggtgaggcggcttcggggtcggaagcagcctttcgtcaggcctgagccggtcgtctggttcttggccgaagctaagcccaaagtgaggcgctgagtcgggaagaaacaacgaaaccaatatcatcctgagcgagtcgtcctgggagaccgttgcaagggctagtgagaggagagcttcacccggctcttgccgtgacctgggtgtcttgttcattacgacacagtgtcgccgcaaacacgctagaaacactggaaagggcggcggccagaacgtcgagaaacgcaatatactttcgaacgacttcggtatccggccatacgatcgaggtggacggatgtgcgatcgagtttctatcgtccattagcgctgtcaatttttgcttcgcaagcgattcagcatttgtgggatcttgcgtcataaagtaggcttgaatcgaggcctgttgtcctaatttcttccatatttccttcgcgccgatacggtcataaagatccgtaagggtgtcaggcttcatatttgtttcagtaatcgaaaggcactgataattgatattatcgatcgtggcttcggctgatagattggctgccaagtttttggtgaaagaagcaactgcgccgtcgccatgttgatacttccttggtgattgcatcacgatcgcagtgaacacgactaagctatcctgcatcttctttggcaacgccctaaatgatgatgcccgctgagccaatcgttggcaaaggtcctcaaacgaagtacgtgtgtactcttcgaatcgtcctgcaatgtagaggatcatcgtaccgctaacgacaggcaacccctggtgtgaattccgggtgcattgatgtaaggtatttgcttggcggagatacttgcggatttctgtgcttgcactcgactttcgctccctgtcgatcgttgatgatcggacatatctctccgataactcagaggtcgccgagaatttcttgatttcgtcgagtaagtccaattgccgggaaatggtcacaaggtctcgctgaaactcggaaaggataaggtccatgcgcgcctcaggccgaaaggatcgttcttgcaagcgccacgcgagccttgattgcttctacagtgttcccgcggcccacgagaatatcgtaatcctcctttgtgctgagggctttggtaagcctgtcctttacagtgagaggctctgcgaactgcggtggcggtgaggaatcggacagggtactagctgcgaccataagggcgtcgtacaaggggcgactgggccgcttggtccctggaagaacgatgaaatcggggccaatcagtcggatgagagtgttgatacttgaggtgaatagtgccccaagtttgtcggcatcatcattggaaatattcctgtatttcctcattgtccgatcgaggatgtgacgtagcgaaccctttgtctctcccgagatagtctcacgaatcgcaaaaaatcgtaaaacgagttcgcaatccatcatcgattgatagagaatattctttgtgagttcgggagcgggttctttttcctcattttctgttctgcgagggatgccccatacattggcaaagctgtcttctcgagacaggcgcttgatcatcgcattgaaggtgcctggaaatgctgcatttcttaattcttgaggatttaattttactcctccggtattaagtcgtctgaagagcaccattctaatatcaaaatcgccatcgccacgagcagtttctgcaagtaataccacggcacctattgtgcgtcgtagtagtccgcgtctaactgcctcggggagatcacgaaaccgcttcgagttgatttctggccaatattccaggccggttagcgcaaaatcattgtctagaaaatcggtgattgtctctagtcgctgccggccatccatcacttcgtattgattatagtttgcctcgaacaggaagagtgatgggatgggtacattcaaaagaatggattcaattagtagcgacttcttttttcggtcccagcgggcacgccgttgatatccgggagccatgtttatgtagtttgattcgcgtagggatgcctggagttgatgcagggtgaaatccattgtggaacggacgactctcagttgagtttccgcgtatttcctttcaatgtcgtccgaggtacttgacactgaaacatcggtttgatcgtcctcggactcataccattcgtcaacttggtcttcgttgatgtcgaggggctggtccaatgaagctgatatggcggtcataaataaccctttgttttgggagtggtgcgtgttcagcagtctattacaagagtgctgtgcatggacaagccagatcctgcggggcgcaagcaaatatttggctccgccgcgatccgtgatcggtccgggcgagccgtattggggctgtttaaccgtggctagtagcgccgggggctccgagggggcggccatatctcggctcgatccgttgcggccagctactacgacaataggcggcccaggacctgcaccgccgatctccaggtattggtcaacaggccattgaattgttggctcaccttggccggctgccaacagcaccggtgagcgatggccggtcgctcgctggtgcaggcgcggctggggtggcgcggctggggtggcgtttgcgaaaagatgagcactgccgatagtcaggcaaacgcctgcccattagccaatactggcaaacggttcgtcagctgcgagttgagttgcgtgctcatcttcgggtaggcgtcgaatagggcgtgggagcgctgggccttcaattcgcactcggcgcggatctgcttaatcgtcttgaagccccatctcatagccttgcacgcagctgcaggtccagaccatggtgttactccgcacggcccgttcctctgcctgcctgcgggcttcgagggcggcttcagcagcttgcccagcccgcgggatgtctgccacgatctcggcccttgccgggcgggctccggccaagtcggcggccagcaatggtgcgcgccgcatgtcaggctccccccggcgtagataacggcccggcgcatgtcccacaggccgtagagatagactctgatctcgcccgcggctgggccgtgatcagcccttccagccgctccaaggtctcgtagaaggggttctccaggtcgagcacgcaggataggtcgctatcctgactcggattgaatgaaaaatggcttccgcccagccgattcgagtcacgcgcgcacgattggtcacttcggaaagggtggcatgtcccaaggaggggcactgcggcggaaaatcggggggaagagaggaggaatctacgccctgtgtggcggcccattgacatgggcacgccacacaagtagatcagacggcctagaggccagcctatgtgactggagctactcctagtcggctggcattttgctagtatatacgaggcgataggtcgcgtgcatcgatgggtagcccagaaggtaattgtgaataaaaagccacttgagacgcttttcgaggctatgtaccacagcaagcgttcgttcgacgatttcgcgcgtggtccagtggcccagaagtacgtccgccaccgcttctgcaagcagggcaagacgagggaggttctcagtcccgacgacaagctgcgtgcctaccacgagttcctgaggctcttcctgctcgactttctaccgcagaatgaggaagtggttttctcgtatcgaaaaggcgtgagcgcctacgacgcggtgagcaggcatgcgcaaagcaagtttttcttcgtttgcgacattgccgatttcttccccagcctcaaacgccatcgcatccgacaaaccattctttctgggaaagactcatctcccgtcgccgatttagatcagtggttggagcgtatccttgacctggtgagcgtcgacgattgcttgcccatgggcttttccacgtcgccgacaataagcaatgccgcgctattgccgttcgacaatgcggtacagtggtattgcgcctcgagggggttgatctacacgcgttactccgacgacatggtggtatccgccaaggagttcgcctcgctagatggcatcgaggaaacactcggggcattcttcgtcgaatacatggacggcgacctggccctgcatcctggaaaatccaagctgcttcgaactggcagcaagatcaggctcctggggatggtactgttgcccaatgggaccatttcggtggacgcgagtatcaaatctgagatcgaggtactaatccacttctatatcaaggacagggcgaaatttgcggatcgcgcagatggagatgcgcagaaggtcgaggcacggttggctggccttctgaattacgcgaacaccgtggaccaatcctatctgcagaagctgcgcaagaagttcggcgcggctgtggtggatctattcctgcaccgctcctttggctagggtatgcacttctcagtcgagctggcggaaatccgcccaataaaagcgctcagcttcgagatcgatcttgcgcgaaaccaactgctctgcattgtgggtaagaatggctcggggaaaactacgctagccaaggcgattctcaacttcacgttggccgacacctttacccgcacatcatcggatggcatttttcatcatggcagcaagatttgctaccgttttggcgcccaagaattcctgttctggtatgacgacaacctgcgcatgctcaactgtaaggcgcctattccagaagcgttgaaggcgcagatatcggttgagctgccgatgccccatgggcatcggttcaatttcttccgagcgcttagcgagtccgatcacgagatccggcgggcgaccatcttgggggattaccgaaaacccgaggagctcatagagttcttgtcgcgcatctatggcgaacgacgattcgacgatctgatcgaggtacgattgcgtacaggatcgtgctgctgcatcacccttccgggcggccgctatctgcgtgaggattatttcagctctggcgaatacttccttattaatctttatcgcagggtacgtaagggccaacggctcgtcgtaatcgacgagatcgacatttcactggacgccgcagcccaggctcgcctcaccgcggagcttcggacactctgcactgaataccacgtgaatatcgtcttcacgagccattctctagcaatgatgcagacgctgcagagcaacgaactgctttatatggaacggaacgccgaaggtgcaacgctcgtaccggtatctttcagctatgtgaagagcttgatgttcgggttcacaggccgtgacagatatattctcaccgaggatgaggtgctcaaggagtttctgtcgtttgtaatccgtcactactgcccacctaccttttatagctattatttaattgaagttggtggggcgggtcaggtcgtcgatctcatggcgcgtaatgatcgcgatggattccttggcccgacggaagacgttatttccatcctggacggcgaccaaaaacacgccaagcacgcccaagggccgaagacctactgcatgccgctagagagtgtcgagaaggccttctgggaagaacatcaatgcccagatttccagccgcgcatttcggcggagcagcaaggccccaaggccctatacaagtacgtaactcgcaacaagattttctcgcaggaagagatcttcaagctcctttgcgatcgccatcatgaggtcattcaggagtttgccagcaccttgcaagcctttctttgccggcccacatgaagagggagcgagatgcggccgcgcggcgggagtccgctgcggtcagttgtccgcagttgactttctggacgcttggtcgatattttcctgaaagctctcgaagaataggtcaatctcctcatccgttgccggccatatgtcaaaagaaggctggggcaagccgggcagccgcttgtcgtcgggtagccacggctgatctaattggccgaaggagaaacgtattcggaggcgattcaatgcgccgccgtttgggcgcacgggatcgaatggccgtatccagtctggcaggccgtcatagtctacagccgtgactaggcggccttcctgctgggcttgatctctaagtgttcgctcttgctcttcgatttccgctcggtcttcaaacacctcgcatccgagctcttgaatcttcgcagtccactcctgatacgtaaccgcggcttcagacgcgcagcgcggaggtcgcggtctcccacctttcgaaccaccaggcggtaaaggcagcttgccatgggccagattcatcaatccgcgtcgaaatagcttcagtgcagctcgctcgctgtcgaggcgggcaccaagggcatcggcggaagcaaggtccacgaggcctaaaggcagcagctcgtcttctgtaacgtagccaagctcgtgggcaagggtagcaacatcaaacagcttggctatggacaaggcctggcccgacttgctgtaggtcccctccatgtgcctgtagcgcagccattcctggccagtctcctggtcaaacatgtcccgcaaccccaacccgaacttggcctccagttgtgctggagatagcccggaacgtttctcgatcaggcaaagcagggcaactgtggcgcccttcattcgctgctgaccgtacttaccgtctcgatgtcgccccattcgaaacctcgtggaattcccttttgctggcagatgtgactcaaagcatcctatcagcacttggatagcgaggaaacatgacagatgaagaccgccgacaaatcgagagtggatttccgcgtggcgttcgcaaacatggatagatgcgcgcttttgtcgcccgaagaacttgccgaattgcttggcaagagccgaaacgctatctaccacatgcttcggcgagacgaggattcatttcctcaaccggtccttcgccagaaccgatgcattcgctggcgtgccggtgatgtccgagattggatagacagcctgtcgagcgcgaagccgcgtgagatagagactgcaaggaggcggggtcggcctcgccagggcgatttgcagaggtccccttctgatagcgcacctcttgctaacgatcattcgacggcgctcggacaagcgcgtgcacgcaaacttgtgcgttttaccttggggtgatctggtcgcgcccctcttgtagtgctgatccgaagtcctgcagccgcaaccaaccataagggccttaatggctgacgatcgttttcagaaccacagtggcggcgtagttcacgttcactacgatgtgcgctacggctccgtacctgaggcgttgctggaagacagccgcctggggctggatactagggctgttgctgcctggctggccgtgaagcctgccggctggcagattctagtcggagttcttcagtcgcgactagagcttggaaaggaccgttgggggcggatctctcgcgagctggaggcggcaggatacttaagacgtcgaagagctcatgggccgaggggtcaatggctctggaacatcgtcttcaatcccgtcccaatgagccgaccttcgaccatgggcggctttcccggagatggtgctcacggatccgggcagcgcaaccccggtcgatccggaactgggacctccgactccggcttacccgaggccggttctgccggcaatatagaagtaccagacaagaaaaaacatctaagtaaaaaacaatcaactacgacccaggcgcccatcgctgccgcgggcagttgcactgcctcccgctaccgggagctgttttgggctcgagccgttgagcctcacaaagatgtagtggttgcttgtcttgatcgaagtgaaatggacatgcctactgcgcagaagattgtcgacgagctggcaggttgcctggaggcggccgcgttgggaaagcgtgacgggatcgcaagtatccagggttgggttgcagcggtcgtccgtcgctgcaagaagggtagcttcgtcatcgatctggggcgggtcgtggcccgtcggcgtgatcaagcgacgacggattcagttgtgcatggatcatcggtacaccagtcccataccagccgggagaaggggcgagaaaatctgcggacgctccttcagacacgggacggcactggcagactaaatccgtagccaattgccgagctataagcgccggcgtggattgccggctcatgctaagggtgccggaactaaggccggcgaggtgatttggtcgcgcatccactcaaaccggtagccagctgcaccagtagacgatttgcttatgcagtctctcaagagccaagtccatttgaatcggcagtgtcggatcgccccttcgggtcgccgctctcccttgcgcctagcggcgcggggacccgtgcgcctcgatccgggcgcgcggcgcgcgcgagacgtggccagtcatcgccggtttggcttgcagaacaggggcaggttctcacctcggttagcccttgccgtcgcgtggcagaccgctggctgttgtgggcgggcggtgggctgtgtgtgggcaacccggaagggttgttcatccgccgcgtcatggtcggtccctaaggtggtgcgggtggaccatgtccacagcttggctgaagcggttcgaatgagggtgcagggcaagcgcactgaacatgcagtgtacctgccggtttcatgccctgatattgcagtgatagtgcagtcagggtgcagtgagcgtgcactgagggtgcagcaaaagtgcagcaaggtgccgtgagggcgcagtgatagtggcgggaaacagagtcatcagcaaggtgtgaacgccggcgttatttcttcttggtcagctcgtgcctacgcatggcaaaccagcagctgcggtgggcaagtgggggcaagcggtgggcggcgcgtggtcaacccggtagggttgtccatcgccgtccacggtttgtccacacgctggcgcgtcagcgccatgtccacggcaggctcccccaaaaaaaccgtgctcaccctggtggtgccccgatttatgcgttcatgtatgccgcatacccatcgcgcggatgcacgttaccaagtagaggtctcgtggggtgatttagtcgcggtggctggccggggatgctggtcgcggagaaagacggcatcggtccgccggcggaagtcgttggcgcgcgcggaggcgaaggaggttgcatgctgatggtggttgtcgggagggtccttgggagggtgcccctcccaagcgcgattcctcgtttgaatggcttgcttcgcactccattcaaacgaccgcggtcagggccatgccccgacaccccgatacatgtcttcctcccacgcgctctgacagaacatggcatcccctcacgtatcctttaagcgtggcaaagttggcaacggtgccgcgcacgccgcctacgtgaggggtgagggaaagtatgccgaccgcgacgatgtgcgggcagtggtcgatggcaacctgcctgcctgggcgtgcggcgacgcatataagttcttcgcggcggcggacgccaatgagcgcaagaacgggcgcgcatatctcgaggtcgaggccgccatcccgcgcgaagccgcggatccgattgcctgggcgcgcgagttcacccaatcgctgctgggtgaccgctttgcctaccggctcgccgtgcatgaccggcaggccggcgacggcgggcggaatgtccacctgcacctgatgttttcggaccgcccgaccgatggcgagcacttcgacgcgaagcgttttttcaaacggaacggctccatgaaggaccgcagctggaacaagcgtgacatggtgctcgaggtgcggtggctatttgccaagcacgttcgtgaagttgtgcctggctgggagccgcccgcgccggcgaagccggaaccgaagattggtcccgccttgcccaaggccggcacgctgtaccaccaggtccgcacggcgcgcctggcggaggtggagcagatccgcattgagcgtcggcaggaggccgagcgcgagaagatccgagacgacctcgccgaagccaccaaggatctgtgcatcccgtgggaagtggatttgccccagctcgaacgtcggctcaatgccctgctgacgatgccgctgcagcttggccagcaggccgagctgcaggagctgcgccgcaaggctgagctggagcgtcgtcgcagggaggcgcgggcgcgccagaaggcccgggaattggaaaatgcggcccagcacggctgcgtcagggacctgctgaagatcgcgctgtacgcccgctattgcgagctggagggggattcggcgggtggaaagcgactacgtgctgaagtccagcgtgagatgcgcaacaccccggcgactcggaagcgcgcggactacacgcaggcgctggtcgttcgcctggcagcagaggaattgctgcgcgacggcttgatcggcgagggcgtggctcacgcccttggtgtcaacgcgaagctggcaaagtctctgggccccaacgggctggccaaggaaaccagcgagcaccttatggcgtccatcaaggcagcggaagtctccaatgctgccgtgggcaagcaggtcagggaggtgaatctggcgctgaacgcagctgccgcgacaatcatgcagaccatgcctggcgactacagtgctgctgccaatgcggccggaatcgttgcgagtgtggcaacacagttccgatcgttctctgccgtcccggcatcaaaggctgacgggcagccggtggtgaaggcctctgctgccgacaaaggcgctggagcggccaccgtgccgaaactgcgtgcgtccaagccgtgatacccgcatgagcaaatgcaagtggcgaaagcggagtatcggcccgggggagtgcgacctcacgtcgatttcgcgtcgggccactgcgagtcggtcattgcgacgctcccacgggccattcgtcaagttcaaactacttcctactaatctatgcaagtaagcagcccggtaaaggctctacgccaagccgaagtgacacccccgccagcgctggctgcggcgatgcccacgcacctgttcgaacgcttgcgcatgaaccctataccggtcttggtcatggacagcccttcagcccacactctgtgggccgggttctgcgctgcgagcgaatataccgagcaaggcgaaatcgcaattggccgatgccttgtggagccaactgtgcgacaaccacggcgttcagcgatcctcagcacttatctccatgaggccgcacaccgtcttttgcctgaccagcaccatcacaacgccgcctttggtgccatgatgctcgtgttatatctccgtgccggctccattgatggcgcggatctgtggcagtcttctggcctatatgactaccaggacgaagctgaaaacctgccgcaaggcttcaattgggcgtggcggacggcaaacgagctggcgacaacagaactacctgcggaagagtgcgcggaaatcatcgcgcagcgatatggcaaatggcaggagtggttggccggcgcggcggaacggaagcaggcccgtttggcaaaggcgcaggccaatgcgcagtacatcgagagccttaaagaaaccagattcttgttggccggcttgggctttatggctgggatgttggcaggggcaatgatcgccctgcagtttgtcgcatgaaattgcttgcgtggtcttttgcatttcgggaagaattgagatgcgtcgatttcgggcgagatcgactcaccctatcaaagttcaactttcgcatgtatggccatgtacgagtcagttggggcggtcgattttcttggcaccgcgttgggtgttgtcgcactaagcggcactattgccgatgtttcagtggagacgtcgcatcgaacccgcgccacgcgcaatctgaatcagcaactgcgtgacgttcagatagatacctatcacacatattcagtatggctgcgcctgcgcgacggtaagtctgcagtactcaggcttgtcaatccaggcttcccgattcgtgtcggcaatatggtgacagcgtactacgctggtcaggacggccaagatctggcaagtctggaactcgtgggctttgaagatcggacgatgggtaaggtgtttgacatggctggacgagcccgactgccccaatcttccggatcgtacatgttgcgctttgcggtcgtttcggcttttggtgcgatcgcgctgcactggcttgcggttcatgtattcgtgtttgtgctaagcgcgccgttggcactgtttttaatgaatggctgggtcgactggtgggtctgtgcaatccctgctggcatctggtacatgagcaagaccgtgctccgggacaagcgggttgccgagggccggcggcgtcttttcgacctgatacgtggtcaacgcacttcgctggctgcgccggagttctgaggttggtagactaggaggaaaggagtaccagcatggcaacgaaactcacccaatacatcatgagcgagcggttccaagaggacgttggccgcggcattgagaaggcgattgcgcaggccaaggctgctggattgcctcccgccggtgaccaggtccttgccacgccgaagaagcggcgcgctaccattgtctatcttcctccgaggccctcgaggaaggagtagagggggcctgccgcagactcgaactgacggggtgcgattcccgggtgagtgctgcatggagcgcatagcgaacctttcacccaatctggaatggcagttcacccagctttgaggaaggcattagccgtggaaaacggaagggatgtcgaggacgaactgctgctccgctgcgctgcaaccggacgcggacaggtgaccgtggcacgcgaccaacgggaagcgaacatttttcgcctcgccgcggtggttatccaatctcgctttccccttgaagctgaaggcatcgttcacgccagtgagcgctactttgcgcggcatcccgaggatatggttccctctcccgaggtgatgcggaagtgctgggtttcgagcatgcctcggctgcaggatatgctcagccgtaagcttggttggagctggaatgttggagagctttcacccaatctggaatcgtcgcggcgggggtcggcgggttcaccccccgcctgaacgcagcagcctttcgaagacccaggggtggtgccaccgtctccggcgcatgagccgctctacatattccttgtgatgggcggcgtcccgcgctgctttaccttggtgtcggcgggcattgcaaagccggcaggcggccacgatgttgctttgggagtccccaccgccatcgactcgggcatgtagatgctcggccgtgcattgaaggtgtcgagcctgccgactggagagatggaaggtcgctgcgaacgcttccatggattgctcccacatggggcagcagcaatagaagcaacggccggattgacgatggaaggcgcgggcgcgcagacgcgcgagagtcgagggcatgagcgatcctgtgtacaggaagatttcggatacttcgaaacccgctcgcccttaacaaggcatacacgggaaccagccaagtagctcgtgctggcacctcttcagctcctagcgaagactgacggggaagagtgtagcctcacattttcctgagacacaaggggaaggcgcgccggccttacaaaatcgcaacaatgcgcccagtgcgaccgcgccgccgcaaactttaatggctctgggagggacgttgacgcgtcgacaaatgccgctctgtccagtctaaggcgtctgaacgcagggaagtctgatcgcacccttggaacactaggtggaaacgacgctaagtgggtcgccacaagccaacgaggagctgaccagtggaggtcccttgccggccagaaagcgacggccgggccctctgactgaatggccgaagctctgacacagcggacgggttcactatgtggagcttgccggactatcgatagcgggtttctgtttcgattgctccagtcccgcccttcaagtcaacccaacctcaccagattcagcgcggccagcggtcctccaggaaactgatgctgtcttccgcccccgtcgagcgaaccgagatcgatgccgaagaacccgaggcgatcgatcaacttggccacctcggctttggcgttcgcatcgtcacccgacatgaacatcacgcggcggccaccttcagcttgcggatcgccggcgaccagcgcgggctgcaggtgattgaacgccttcacgacacgcgcgccgggcaccaggtctgcaaacactgcgctcgacgagcggccatgcaggtccgcggggcgaaacagcggcgcctcgatcgggttgttggcatcgatgacaatgcgcccgccaaagtccggcaacccggccagcgcctgcggcagcttcgaccagttgacggccaccagcacgatgtcttgcgccgcggcttgctcgcgcgtgcccgggcggatcgaaggcccgatggcttgcacggcatcctgcagcgtttcaggcccacggctgttggccagcaccgcctggatgccgtggcgtgccagcgccgtggcaaacgccgtgccgattgcgcccgcgccgatgatgccaatggtctttccgtagcttgcttgcatgacggtctcccggttcaggcggtgaagccgccatcggcaacgatctcggcaccggtgacgaaggctgcgtccggaccggcgaggaacgccaccacgccggcaatctcatgcggctgcccgtatcgtcccagggcaatgccgggtcccacgatctcgctgaccgggccgccggcgggattcatatcggtgtcggtcgggccggggtggacggtgttgaccgtgatgcctttcggccccaggtcgcgcaccaggctgcgattgaagcctgcgatcgcgcccttggtcagcgtgtagagcgatgccgttggaaacgccgcgtagcgcgccatcgatgaaccgatgtgaatcacccgcccgcccgtcttcatatggcgcaccgcttcctgcgtggccacgaatacgccggtcacgttcaccgcaatcatgcgctcgtaggtgtcgaacgcgatgtcctcgatggcaccgcccaagctcaggccggcgttgttgacgaggatgtcgaggccgccgaaggcgtcgaccgtcgctgccacggcccggcgcaccgcggccgcatcgccggcgtccgcggcgagcgcgatggcgcggccgccggctgcttcgatctcgcgcactaccgtggcggccttgtccgctgaggcactgtaggtcagcgctacggccgcgccgtcggcggccaggcggcgggcgatggcggcgccgatggagcgcgatccgccggtaacgagggcgatcttgccggccaggggaagggtctgttgagtcatttctttctccgttggggtgaatcacaaggtgtgaacggagtatgggtgttcgattgcgcgatgattagtaatgaatgactggaatcatcttcaagcaatcgtgtaagctgagccggatggaaaccctcgccaacctcgaatcctttgtgcgcagcgccgaaaccggcagcttttcggcggcgggtcgccgactggccctgacccccgcggccgtcagccgcaacgtggcaatgctcgagcgcaatctgggcgtgcgactgttccagcgctcgacgcgcaagctgacgcttaccgaggctggcgaacgcttccttgcctccattggcggcaacctggacgcgctgcaagccgccatcgccgccatgtcgaacgaccacggcgaaccggccggcgtgctgaaagtcagcctggcgccgtcgttcggcgtggcttacgtgatgccgttgctccctgatttcctgcagcgttaccccgcgatccgcccggaatggcatttcgagaatcgcgccatcgacttgattgccgagggcttcgacgcagccataggcggaggcttcgaactggcgccgggtcttgtgtcgcgcccactggcacccgcgcatatcgtcgcggtggcgtcgcctgcgtatctgcgggaacgcacgctgcctgccgatccggccatgctgaacgtcatggacggcatcgtcatgcgctccgggcgcaccggacgcacgcgccactggactatgcgcgatgccgccggcaacgaggttgccacgaccatgcgcgaacgcattgtcgtcagcgacccggccgccatgcgggaagccgcgctgctgggtctgggcgtggcactgctggcggtacccgatgtgctgccatggatcgaacgtggcgaactcgtacgcgtacttccgcgctggtacgccgacgccggcgccatttcgttgtactaccctacgcgcaccctgatgcccggcaagacacgcgcattcatcgaccacgttgtggaagccttccgccgcgatggactagcgcagcgactggcaggcagcctcggcctttagcgttgtctaccgaggcacgccgtttcgacgaccgctctggcccaaacttgagtcactcgccaagctttaacgaagggcaggagtgggtcggcaggagacagtgagcagctggtgcagggcagtccaacgaattcgtgcttcatggcgagcgacatgaagcctgccatagaccgttattggcaacggttggtcagctgcgcgttgagctgtgtgctcatctgcgggtaggcgttgaatagggcctgcgagcgttcggttctgaccccgctctcggctcgtatctgcctgacggtcttgaagctccagatatcctgaccatttacacaggtgcacgtccacaccagggtgttgtcgatggcctcctcgttggccttccacacagcccgttcctctacctgccgctgggcttcaagcgctgcctcggcggcttggccagcccgcaggatatccgccacagtctgggcccctgctgggcaagctccggtcagggcagcggtaagcaatagcgcgcgccgcatgtcaggctcccccggcgtagacggcggcccggcgcatgtcgtacaggccgaaaagatatgcgcggatctcgccctctggctctgccgcgatcaggccctccagacgctccagcgtcatacggaacggatcctccaagtccagcacgcaagacaaggtgctgtcctgggacagggctcgcaaagggtgaatagattgaatggtgtcagccatagcaagacctctataggtttgttgtggtcagcggatgcggcggggtgcaaccaccgcattcgtccccgttcgtaattgcggaactcgattaagggatctataaggcgcttctagccgagctttaatgcgagatccttggctcgggggtggtagtaacgtcgaagcatttgaagtgtcttgtggcccgtgaccgccgacagttccaggacgttgtccaagcgttcggctattcgcgacgttccctcatgccggaggtcgtgaaaccgaaagttctcgatgccagcccgttcgcaggcgcgcgtaaaggcctttttaacggcgtcagcagatgttggaaacactctgtccgaggccgatgtcgcgagctctgccagcggggcgagggtgctcacagccttggttgaaagggggacatccctcgactcaccatttttcgagtcgtgcaagcgtacaaagcgatcttcaaggaatacgtccgaccaccgcaggcttagtagctcgccgcggcgcatggctgtttccaatgcgaggatcgtcaacggcaagatgctcgggttccgcgaaccgcctttgtcatagtggccacgcccattgcgtgggctggcagatagttcggcaaacagacgggcctcttctgcagccccgagcctgcgggtgcgaccgcggctttcgcggggccgcctgatcgtcgagactgggttgatagccaggtgtatgtcccattccttgttggcgacattcaagacatggctgatgagggttagctcccgatttactgttgatccggaaaccgggcgtcgctcgccgtcgcccttgaggcgacggtctcggtatgccgccaggaccttgccagtgagggcggcaatcttgtagtgggcaatagggtcagaacgtagcttgcgaattcgaaggacttcttgctcaccacctttcttgtggggcgagatctcttcgctgtaccggaggagaaggtctccaagagtgttccgctcagcctcccggcggtcgacgaaggaccctcgatccatttcgacctccacctggcgagcccagctctcagcgtcagcttttgtatcgaaggtgcgcgcttggggtgggtaaccgcgcttacggatcgcgacgcgccaatagtcgcctcgtttccagatcgatgccattcctgctccagacaagtgattggtcgtgtccgggccgattgtctgactgcgccacttttgcgccaaaagggcattccgcgaggttttgcggcaatgaaaaaaggccctcgactttcgtctgagggccttcttccatgcggcttcccgcgaatctggtgggtggtacagggattgaacctgtgacccctgccgtgtgaaggcagtgctctaccgctgagctaaccaccccttactgcgccgtcgttgccgtcgtgcagcggagaaatgagattatgcagaggttcttgtatcttgtaaagcccttttttgatttttgtcaggcggccaggcttccgggttctgccgcgggggcttcctgccacaccgtcttgccgccgctggccttgtccaggcccttgagcagggcgagatgggcctgctgctcttcgtccgtggcgcgcagcacgggcagggccaggcgcgacaggtcggccgcggcaaccgcgccgccgtggcctgcggtgctgtcgtgcatgtcgatcaccagcgaatcctggccgcgcgtcatggccaggtagacctcggccagcagctcggcatccagcagggcgccgtgcagcgtgcggtgggcgttgctgatgcccaggcggtcgcacagggcgtcgagcgagttgcgcttgccggggaacatctggcgggcttcgcgcagggtgtcgatcacattgccggcatgctggcggaacggcggcaggcccagcagctggaattccatgtcgaggaagcccaggtcgaacggcgcgttgtggatgatcagctcggcatcctggatgaactcgcggatgtcgttgacgacttcggcaaagcggggcttgtcggccaggaactcgaccgtgatgccgtgcacggcgatcgcgccctcgtcgatatcgcgttccgggttgacgtagaagtgcaggtggcgccccgtcaggcggcggttcatcagctcgacgcagccgatttcgatcaggcggtcgccggtggcggcactcaggccggtggtttcggtgtcgagaacgatttgtcgcatggcgggcattctagcggagctgcgtgggcgccccgcggtttcttgttagcgagagggatcagcggccgatcgattcgacgccgcggttggccagcgcgtcggcgcgctcattgccggggtggccgttgtggccgcgcacccagtgccaggagatctggtgcggctgcgccagggtgtccagttcctgccacaggtcggcgttcttgacaggcttcttgtcggcggtcttccacccgcgggccttccagccgggcagccattcgctgatgcccttctggacatactgcgagtcggtatagacacgcacgacgcagggacgcttgagcgcgcgcaatgcttcgatcacggcggtcatttccatgcggttgttggtagtgttgggctcgccgccgaacatttctttctcgctggcgccggcgacgagcaccgcgccccagccgccgcggccgggattgcccttgcaggcgccgtcggagtagatcgtgacttcttgcatgtgattccaaggtggccacccgccgggcaggtggcgctttgagggcgaatcgggtgagagcgcgggcgcgcgccggcgtcagcgctcttcgccgggggtcttgccgtgggtgccggtaggcgtggccacgggcgatgacaccggagccagcgccggcttgctcttccaggccgggccgaccaggcggatattgcgcacgcgcttgatcgccgagatcatatagaccgcgccgaagatcggccaccagcggtcaccggccttttccatgaaggcggcgcgctgcagccagcggtcggtgcggtagggcgggcagtagcagccgaagcggccgcggatgatatcgaagcccagcagcttgagccagtccttgatgcgcacgaagccgatctgctgcgcgtccgtcggcaggaagggcgtggcgccgagccggttcatgccctggcgcgcgccccacaggctcatcgggttgaagcaggtgaccaccacgcgcccctcgggcatcagcacccgcgagacctcgcgcagcacttcatgcgggtcttcggcgaattccaggatgtggggcagggtgaccaggtcgatgctctgggtgtcgaacggcagctcgtcgaagcggcacagcaactggcgcgcgtcgggatgtgcggcgcgcggcccgtgcggtccactggaagggtccagcgccagcgccgagaacggcatccggttctcgcgcagggtgtcgataaagggcaggcccaactggacggcgtggtagccgaagatgtcggtcacgatccggtcgtactgctgcgcctcccagcgcagcatgtactcaccgggcggcgaggccagccagtcttcccagcttacaatcggatgattgggacgattggacataggagcatgcgcatgttgaaggttgagccgatcccggcgttccaggataactatatctgggccatccacgacggtcatagcgccgccgtggtcgatcccggcgaggccgcgccggtggagcgcttcctggcgcaaagcggtctggctctgggcgctattgtaatcacccatcaccacggcgatcaccagggcggggtagccgagttgctggcggcgcacccgcgcacgtcgtcgggcgcgccgatgccggtgctggggcccgccggcgaacgcattggcgggcgcacccgggccctgcgcgaaggcgatgtcgtgacgctagagacgccggcgctgacgctgcgcgtgctggacgtgcccgggcacaccgccggccatatcgcctatgtgggcgacctgggcgaagccggcccggcggtcttctgtggcgatacgctgtttgccagtggctgcgggcgtctgttcgaaggcacgccggcacagatgctggactcgctcgacaagctggcggcactgccgggcgatacccgcgtctattgcgcgcacgaatatacgcgcagcaatgtgcgctttgcacgggcggtggaaccggccaatgccgcgctggcggcatgggagcagcgggtcgacgcgctgcgcgcggcggaccagccgacgctgccgaccaccatcgctcatgagcgcgaggtcaatcccttcctgcgctcgcgcgagcccgcggtgcgcgcggcggtggcggcgcagggcggggccgccacgggcgatgcgcaggccttcggtgcgctgcgcggctggaaggacaatttccgctgaaccctgccgggccttgcgccgcaaggctttccggctgcccggcggatactggccatatggaaaatctgattgacgcgatacgcggttttttttagcatcacgcatccttttggcgtcacgattcgagaacttaatgaaaattggtcgattactggcggtggtcgcgtgcgccgcgctgcttgcagcgtgcgccagcaccccaacgccgcctgatggcgccaacggcgccgcgaccgcccagaccgccaagcgccaggacccgctcaactcgctcagcgacaaatcggcgctttcttccgcatccacgatcaatgtcgaccagggtggcctggactggctgcgcggcccgtccaacgacatctgggatcgcatccggcgcggctttgccatgcaggacctggagggcacgctggtcgatgaccgcacccagtggtatgcgcagcggccggaatacatggaacggatggtcgggcgctcaagccgctacctgtaccacatcgtagaagagctggaacggcgcaagatgccgaccgagctggcgctgctgccgttcgtcgagagcgcgttcaacccgcaggcgcagtccaccgccaaggcggcgggcatgtggcagttcatcccgagtaccggcaagtcgtacaacctgaagcagaacatgttccgtgacgagcgccgcgacgtgctggcctcgaccgacgccgcgctggactacctggcgcggctctacgatatgttcggcgactggcacctggcgctggcggcttacaactggggcgagggcgcggtgtcgcgcgcgatcgcacgcaaccaggcgcgcgggctgccgaccgactacgccagcctgcccatgcccaacgagacgcgctactacgtgccgaagctgcaggcggtcaagaacatcatcgccaacccggctgcgtatggcgtcaagctgcccgagatcccggaccacccgtactttgtcacggtgaccacctcgcgcgatatcgacgtgaacctggcggccaagctggcggacatgtcggtagaggaattcaaggcgctcaatccgtcgttcaaccggccggtgatcctgggcgcgtccaacccgcagatcctgctgccgttcgataacgccgagcgcttccagtacaacctgaacacctaccgcggcgggttgtcgagctggtcggcggtgacggtggacagccgcgagcgtatcgaagcgctggcggcacggctgaacgtcgacgccgatacgctgcgcgagatcaacagcatcccgaaaggcatgcgcctgaaggccggctcgaccgtgatgatcccgcgctcgggccgccacgaccaggatatcagcgcgaccctggccgacagtgccatgctggcgatggagcctgatttgccggatgcgcgccgcgtggtggtgcgtgccgggcggcgcgacaccgtggcctcggtggcgcggcgctatggcgtctcggcggggcaggtgcaatcgtggaacaagctctccggcaccaagttggtcgccgggcagagcctggtgctgatggtgccggtgcgcggcgccggcgcggtgcgggcggcgcgggccgaacaggccgaccgtgccgagcgcgccgaccgtgcagagcgttccgagcgaagcagcaagggcggcatcgtgcgggtctcggccaagggcaaggcgggcaaggcggagccgcgcaagcgcgtcaccgtcgaggcggcctcgcggcgcacggcagtcaaggcgacgccggcgcgcgtggtgcgcgagtccaagccggggccgaacgtcaaggcgtcggccaaggccggcgccaagggggccaaggcccgctgacgaatgcgggcgccggctggtccgccgcatggcgcaagaaggggcgatgccgtcggcacgcccctttttttcatgtgccggcccccggggcccgcgcgcccctctccgaatctgtgtccacgcgcacccgcgccggtggcaaactacggtcatcatcacaatgaccgcagacgcggaggagacagacatgacggcaagccatgccgtgcatgcccgttcgctggccgaccccgaggggttctgggccgaacaggcggcgcgcatcgactgggaaaccccgttcggccaggtgctcgacaacagccgcgcgccctttacgcgctggttcgtcggcgggcgcaccaacctgtgccacaacgcggtcgaccgccacctggcggcccgcgccagccagccggcgctgcactgggtctcgaccgagaccgaccaggcccgcacctttacctacgccgagctgcacgacgaagtcagccgcatggccgcgatcctgcagggcctggacgtgcagaagggcgaccgcgtgctgatctacatgccgatgatcccggaagccgcctttgccatgctggcctgcgcgcgcatcggcgcgatccattcggtggtgttcggcggctttgcctcggtcagcctggccgcgcgcatcgaggatgcccggccgcgcgtggtggtcagcgccgacgccggctcgcgtgccggcaaggtggtgccctacaagccgctgctggacgaggccatccggctctcgtcgcaccagcccgggaaggtgctgctggtggaccggcaactggcgcaaatgccccgtaccgagggccgcgatgaggactacgccgcctggcgcgaacgcgtggccggcgtgcaggtgccgtgcgtgtggctggaatcgagcgagccgtcgtacgtgctatacacctccggcaccaccggcaagcccaagggcgtgcagcgcgataccggcggctacgcggtggcgctggccacctcgatggaatacatcttctgcggcaagcccggcgacaccatgttcaccgcgtcggacatcggctgggtggtggggcacagctatatcgtctacggcccgctgctggccggcatggccacgctgatgtatgaaggcacgccgatccgccccgacggtggcatcctgtggcggctggtggagcaatacaaggtcaacctgatgttcagcgcgccgaccgcgatccgcgtgctgaagaagcaggacccggcctggctgacccgctacgacctgtccagcctgcgcctgctgttcctggccggcgagccgctggacgagcccaccgcgcgctggatccaggacggcctgggcaagcccgtggtcgacaactactggcagaccgaatccggctggccgatcctcgcgatccagcgcggcatcgaggcgctgccgcccaagctgggctcgcccggcgtgcccgcctacggctatgacctgaagatcgtcgacgagaacaccggcgctgaatgcccgccggggcagaagggtgtggtcgccatcgacggcccgctgccgccgggatgcatgagcacggtctggggcgacgacgaccgcttcgtgcgcacctactggcaggcggtgccgaaccggctgtgctattcgaccttcgactggggcgtgcgcgacgccgacggctatgtttttatcctgggccgcaccgacgacgtgatcaacgttgccggccaccggctgggcacccgcgagatcgaggaaagcctgtcgtccaacgctgccgtggccgaggtggcggtggtgggcgtgcaggacgcgctcaaggggcaggtggcgatggccttctgcatcgcccgcgatccggcgcgcacggccacggccgaagcgcggctggcattggagggcgagttgatgaagacggtggagcagcaactgggtgccgtggcgcggccggcgcgcgtattctttgtcaatgcactgcccaagacccgctccggcaagttgctgcggcgcgccatgcaggcggtggccgaagggcgcgatccgggcgacctgaccacgatcgaggacccgggtgcgctggaacagttgcaggcagcgctgaaaggctagatggcgggctgagggcgtgggatgcgggtgccgtgcggggcactccgcctcccgcccttgccatcggccgtgatgcagtctaatatttgaagtataaaatatttagacatcatctagatggcggtgtgatcctgggcaaaggtgcccggcgcagccggcaggaggcgacagatgcgagtgctttgtattggtggtggcccggcaggcctgtacttcgggctgctgatgaagctgcaggatccggccaacgaggtcatcgtggtcgagcgcaaccggccctacgacaccttcggctggggcgtggtgttctctgacgccaccatggacaacctgaagcaagccgacccggtcagcgcggccgagatcaacgcggccttcaaccactgggacgatatcgacatccatatcggcgggcgcaccatccgctccggcggccatggctttatcggcatcggccgcaagcgcctgctcaatatcctgcaggcacgctgcgaggcgctgggcgtgaagctggtgttcgagaccgatgtgtccgacgaccaggcgctggcgatgcaataccaggccgacctggtgatcgcctcggacggcctgaacagccgcatccgcacccgctacgccgacaccttccagcctgacatcgacacgcgccagtgccgctttgtctggatgggcacgcacaagctgttcgacgccttcacctttgccttcgagaagaccgagcacggctggttccaggcgcacgcctaccgctttgacgacaccacctcgacctttatcgtcgaggccccggagtcggtctggcgcgccgcgggcatcgagcagatgagccaggaagagggcgtggcctactgcgagcgcctgttcgcgcgctacctcgacggcaacaagctgatcaccaatgcggcgcacctgcgcggctcggcgatctggatccgcttcccgcgcgtgatctgccgccaatgggtgcattggaacaccttgcccgacggccgccgcgtgccggtggtgctgatgggcgatgccgcgcacaccgcgcacttctcgatcggttcgggaaccaagctggcgttggaagatgcgattgacctggccgaggaaatccgtggcaggggtcatgacggcctgcccgatgcactgtcgcgctacgaagccacgcgcggcgtggaagtgctgaagatccagaacgcggcgcgcaactcgaccgaatggttcgagaacgtcgagcgttacgcgggcagcctgccgccggagcagttcgcctattccctgctgacccgctcgcagcgcatctcgcatgagaatctgcgcgtgcgcgatgcggactacgtggcgcagttcgagcactggctggcgcggcaggccggcgtgcaaccggaaagcctgcaactgcgcgagcaccagccgctgccgccgatgttcacgccgttccgcgtgcgcggcgtcacgctgaagaatcgcgtggtggtgtcgccgatggcgatgtactcatgcaccgacggcgtgcccggcgacttccacctggtccacctgggttcgcgcgcgctgggcggcgccggcatggtggtggcggagatgacctgcgtgtcgcccgatgcgcgcatcacgccgggatgcccgggtttgtggaacgacgcgcagcgcgacgcctggcgccgcatcgtcgacttcgtgcatgccaacagcgatgcgcgcatcgccatgcagatcggccactcgggccgcaagggttcgacccagctcggctgggaggcaatggaccatccgctgtcggaaggcaactggccggtgatctcggcctcgccgctgccctacctgccgggcgagtcgcagaccccgcgcgagatgacgcgcgcagacatggaccgtgtgcgcgatgacttcgtcgccagcgcgcgccgcgccgccgaggccggcttcgactggctggaactgcattgcgcgcatggctacctgctgtcgagctttatctcgccgctgaccaatacgcgggaagatgaatacggcggttcgctggccgcacggctgcgctacccgctggaggtgtttgccgcggtgcgtgaagtgtggccggaacacaagccgatgtcggtgcgcatctcggcgcacgactgggtcgaaggcggcatcacccccgacgatgcgatcgagatcgcacgcgcgttcaaggccgccggcgccgacatgatcgactgctcgtcgggccaggtcagcccggaccaggctccggtctacggccgcatgtaccagaccccgtttgccgaccgcatccgcaacgaggccggcatcgccaccattgccgtgggcgcgatcttcgaggccgaccatgtcgactcgatcatcgccgcgggccgtgccgacctgtgcgcgatcgcgcggccgcacctggccaacccggcctggacgctgcaggaagcggcgcgcatcggctaccgcgatatcacctggcccaagcagtaccaggccggcaagcggcaacttgaaaccaacctggaacgcgccgcggcgcaggagaagcagggatgacgggcagcacgggttcattgtcagggcgccacgcgctggtcaccggcggcgggcgcggcatcggcgcggcaatcgcgcgccggctgctggccgacggcgccagcgtgacgctgctgggccgcgatgccggcgcgttgcaggcgactgtacaagcgctgcgtgaggtcgcccccgcaggcgccgtagtctcctttgtcacggccgatattgccgatgccgacagcgtggcacgcgccttcgccgccgccgcggaacagtccggcccggtgtcgatgctgatcaacaatgccggccaggcgcacagcgcaccgttcctgaagaccaatgccgcgctgtggcagcgcatgctggacgtgaacctgaccggcaccttcctgtgcacgcaggcggcgctgccggcgatgctcgacgcgggctggggccgtatcgtcaatgtggcgagcacggccggactgatcggctatggctatgtcagtggctattgcgcggccaagcatggggtgatcggcctgacgcgcgcgctggcgctggaaaccgcggccaagggcgtgaccgtcaacgcggtctgcccgggctataccgaaaccgacatcgtgcgcgacgcggtggccaatatcgtcggcaagaccggccgcactgaaaccgaggcccgcgctgaactggccgcgcgcaatccgcagcgccgcctggtgcagcccgaggaagtggccgacgccgtggcctggctgtgccagccgtccgccgcggcgatcaccggccaggcaatcccggtggccggcggcgaggtgatggccggctgacaacgacagaacaaggacctgagagagaacccatgacagagatcgcactcgacatgcgccaccacaagcgcagctttgccggctaccagccggagcacttcctgtggtcggtgtccggcgacggcaaggtcggcaccgtgacgctgaaccggccggagcgcaagaacccgctgactttcgattcctacgccgagctgcgcgatctgttccgcggcctgtgctatgccagcgacatcaaggcggtggtggtgacgggcgcgggcggcaactactgctcgggcggcgacgtgcacgagatcattgggcctctcacgcgcatgaccatgcctgagctgctcgacttcacgcgcatgaccggcgacctggtcaaggccatgcgcgcctgcccgcagccggtggtgagcgcggtcgacggcatctgcgccggcgccggcgcgatgatggcgctggcctccgacatgcgcctgggcacggcgcaggccaagaccgcgttcctgttcacgcgcgtcggcctggccggcgccgacatgggcgcgtgcacgctgctgccgcgcgtgatcgggcaggggcgtgccagcgagctgctctacaccggccgctcgatgagcgcggaagagggcctgcagtggggcttcttcaatgcgctgcatccgtccgaatcggtgctggcccaggcgcagacgctggccgcgcaactggccgccggcccgacctttgcgcatggtgtgaccaagaagctgctgcaccaggaatggaacatggggctggacgaggccatcgaggccgaggccgaagcccaggccatctgcatgcagacgcgcgacttccgccgcgcctacgaggccttcgtcgccaagaccaagccggtgttcgaaggggactgaagcgccatgtccgacaagacctatctcgacctgccgctgttcgacgacgcgcaccgcacactggagcgcgaactggacgcctggtgcgcgcaacacctccatgtcgaccacagcgataccgacgccgcctgccgcgcgctggtgcgccagctgggcgaggccggctggctgcgctactgcgtgccggccgcgcacggcggcgcgctgccggcgctggattcgcgctcgctgtgcctgctgcgcgagaccctggcgcgccatgacggcctggccgattttgcctttgccatgcaggggctgggctcgggcgcgatctcgctggccggcagcgatgcgctgcgcgcgcattacctgccgcgcgtggcccgcggcgaggcgattgccgcgtttgcgctgtccgagccagaggccggttccgatgtggccgccatgcagtgcagcgcacggctgtcggacgacggcagccactatgtgatcgatggcgccaagacctggatttccaacggcggcattgccgacttctactgcgtgttcgtgcgcaccggcgaggcgtcgggcgcgcgcggcatctccgcctttgtggtggacgccgatacgccgggcctgaccatcgccgagcgcatcgacgtgatggcgccgcacccgctcgccacgctgcgtttcgacgactgccgcgtgcccgtgggcaaccggctgggcgaggcggggcagggcttcaaggtggcgatgatgacgctcgacatcttccgtgcctcggtcgcggcggctgcgctgggctttggccgcgccgcgcttgacgatgctctggcgcgcgcctgcgcgcgcccgatgttcggcggcgtgctggccgacctgcagctgacccaggccgccatcggcgacatggccaccgcgatcgacgccgcggcgctgctgacctaccgcgcggcctggctgcgcgatgtcaagggccagcgcaccacgcgcgaggcggccatggccaagatggtggcgaccgagaacgcacagcaggtgatcgaccgtgcggtgcagatgttcggcggcctgggcgtcaaggtcggcacgcgggtggaaagcctgtaccgcgagatccgctcgctgcgcatctatgaaggcgccaccgaagtgcagaagctgatcattgcgcgcgagacgctggccgggcgcaaagcctgacgcccccgcgtgccacccacgaactgccgtaccgatacagagcagacaggagacaagccatggcgaccacagcccacctcgataccttcgcgcgcgaccgcctgccgccgcccgatatgtggccggtgttccgcttcaatgccgataccgactaccctgagcggatgaatgccgcggtggagctggtagaccgccacgtgcgcgaaggccgcggcgagcgcatcgccatccgccatcgccgcgacggacagatcgaggcggtcacgtatgcgcagctggcggcgctggtgaaccgcatcgcccatgtgctggtcgaggacatgcagctggtgcccggcaatcgcgtgctgctgcgcgggcccaacaacctgatgatggccgccagctggctggccacgctcaaggcgggcctggtcgcggtgccgaccatgccgctgctgcgcgccaaggaactgaagcagatcatcgacaaggcccaggtcggcgccgcgctgtgcgatgcgcggctgcgcgaggaactcgatgccaaccagcaggcgggcggcgaattccactgcccgagcctggcgcgcacgctgtacttcaacggtgaaggcgagggttcgctggaggcggcgatggcgggcaagccggatgccttcgaggcctgcgacaccgccagcgacgacgtctgcctgatcgcctttaccagcggcaccaccggccagcccaagggcaccatgcacttccatcgcgacgtgctggccatgtgcgacctgttcccgcgccacgtgctgcgcccgcagcccgacgacgtgttctgcggcacaccgccgatcgcgttcaccttcgggctgggcggcatgctgtgtttcccgctgcgcatcggcgccagcgccgtgctggccgagaagctgacgccagagacgctgctcgggctgatccaggatttccgcgccaccatcgtctttaccgccccgaccttctaccggcagatggcagcgctggcgccgcgctacgacctgtccagcctgaagaagagcgtgtcggccggcgaagccctgccggacgccacgcgccagagctggaaggcggccaccggcatcgagatgaccgacggcatcggcggcacggagatgatgcatatctttatctccagcgccggcgccgaggtcaggccgggcgcgatcgggcgcgtggtgccgggctatgtcgcgcagatcgtcgacgagaacatgcagcccctgccgccggggcaggtcggcaagctcgcggtgcaggggccaaccggctgccgctacctggacgatccgcgccagtccaactatgtgaaggcgggctggaacctgccgggtgatacctttttcgttgacgaggacggctactacttctaccaggcgcgttcggacgacatgatcatctcggccggctacaacatcgccgggccggaggtggaaagcgcactgatgcagcacgaggcagtggccgaatgcggtgtggtcggcgcgcccgacgacgggcgcggccaggtggtgatggcctatgtggtgctgcgcgagggcgtggcggcggacgacgctacccgcaccgcgctgcaggactacgtgaagcgccagatcgcgccctacaagtatccgcgccgcattgtgttcgtgccggcgctgccgcgcaccgagaccggcaagctgcagcgcttccggctgcggcagatggcggagcagggcaatggcggcggcaatggcggcgtcaaccaggcggggaagccatgagccccgtgttccgcagcaccgtcctggtgcgcttcaagcactgcgacgccgcgggcatcgtgttctacccgcgctatttcgagatgctcaacgacctgatcgaagactggttcagcgaggcgctgggctggcccttcgacgccatgcatggcgagggccgaactggcgtgccgaccgccgagctggagtgccgcttcctggctccgagccggctgggcgaggtgctgacgcgggaactgcgcgtgctgaagctgggccagtccagctttaccctcgcgatccgcttcgccggcccgcatgacgatacccgcatggaagtgacgcagcggctggtctgcgtcgataccggctcgattgctccgcagccgctgcccgatgccgtgcgcgaggccatgtcggcctacctggtcgcgacggcctgaatccccgaattccattcactcatacagataatcaacaggaaaacgcatcatgaacatcctgcagccgcccgactgggcgcctccgcgtggctacgccaacggcaccatgaccgaaatgcaggtcggcagccgcctcctctttgtcagcggccagatcggctggaccggcaaatgtgaattcgagaccgacgacttcggcctgcaggtggcgcaggcgctgcgcaacgtggttgccgtgctggcggccggagacgcgctgcccgagcatatcgtgcgcatgacctggtatgtgaaggacaaggcggaatatgtcggcgcctatggggcgatcggccagcattaccgggccatcatcggccgccacttcccggcgatgacggcggtcgaggttgcggacctggtggagccgcgcgccaaggtggaaatcgaggtcacggcggtcgtgccgccgcgggcgtaacgtagcaggcacagggcaggacggtggccggcggcgtggcgccgccgctgcctgccgcgtgcaagtccttgaaaacttgagaaattgggtggcgcgggatataattcgaaagtttcgctttcagaacccttcaccctagcgcctaccgctttccaccttccgccgcccccagccgcgccgcctttgctgtccgcattcaatgtgacgcaaggagcatgtcgcaaccggatccgaccgcatcggcgcaatgccgctgccgccgtcacggatccagcctgggaggcacgaggcgtcgattggtcggtcacggggtgagtccagcaggagcctacccgtgttaccgtcttttccgtccgccattctcgcgcttgcagacggcacggtctttcgtggctattccattggcgcttccggccataccatcggtgaagtggtgttcaacaccgccatcaccggttaccaggaaatcctcaccgacccgagttactcccggcagatcgtcacgctgacgtatccgcatatcggtaactacggggtcaatcctgaggatgtcgaagccacgaaagtccatgccgccggcctgatcatcaaggatctgccgatcctggcctcgaacttccgcaaggagcacacccttgcccactacctgaagcaggaaaaggtggtggccatcgccggcatcgatacgcgcaagctgacgcgtatcctgcgtgaaaagggtgcccagaacggctgcatcctggccggcgaagacaatgtccagaaggccatcgacctggcccgctcgttccccggcctggccggcatggacctggccaaggtagtctcggtcaaggaaccgtacgagtggacccagtccgaatggaagctgggcgaaggctacggcaagcaggaccagccgcaattccacgtggtcgcctatgactacggcgtcaagtacaacatcctgcgcatgctggccgagcgcggctgcaaggtcacggtgctgcccgcgcaggcgagcgccgccgacgcgctggcgctgaatccggacggcgtgttcctgtccaacggccccggtgaccccgagccgtgcgactatgccatcgccgccacgcgcgagttcatcgagcgcggcatcccgaccttcggcatctgcctgggccaccagatcatggcgctggcagtaggcgccaagaccctgaaaatgaagttcggccaccatggcgccaaccacccggtcaaggacctggacgatggccgcgtggtgatcacgtcgcagaaccacggcttcgcggtcgatgcggacacgctgccgtcgaatgtgcgcgtgacgcacaagtcgctgttcgacggttcgctgcagggtttcgcgctgaccgacaagccggccttctgcttccagggccatccggaggcgtcgcccggtccgaacgacgtggcttacctgttcgaccgcttcatcaagctgatgacggacgcgcgcaagtaagcgggcaagaagaacagcgcagacctcagggacatcccatgaacgccttcatgcataccgctttcggcatcaccgatttctggacctatgtgctgggcacgatctttatcgtgctgctgccggggccgaactcgatgtacgtgctgtcggtggcggcgcagcgcggcgtgcgcgccggctacaagggcgcgtgcggggtgttcctgggcgacttcgtgctgatggtgctgtcggcggcgggcgtggcctcgctgctcaaggccagcccggcgctgttctacgtggtgaagtacgtcggcgcggcctacctggcgtggattggtttcagcatgctgcgcggcgcgctgcgcaactgggccgcacgcggcgatgccgccgccgccgcgccggttagcaaggccgaccagtccgacccgttccgcaaggcgttgctgatcagcctgctgaacccgaaggcgatcctgttcttcatctcgttcttcatccagtttgtcgacccggccttcgcttacccggtgctgtcgttctccgtgctgggcctggtcgcccagttctgcagctttgcctacctgaccacgatcatcttcgtgggcgcgaagctggccgacgcattccggcgccgccggcgcctgtcggcgggcatgtcgagcggggtgggcgcgatgttcatcggcttcggcgccaagctggcgacggccacgatgaactgagcaagacgatatttttgaatcctgacggattccctgattaccggcgcggtccgcaggcaaggcgggccggcccataaagagagcgtgcaatgccaaaacgcacagacatcaagagcatcctgattatcggcgcgggccccatcatcatcggccaggcgtgcgagttcgactactccggcgcccaggcctgcaaggcgctgcgcgaggaaggcttcaaggtcatcctggtcaattcgaacccggcgaccatcatgaccgaccccaacacggccgatgtgacctacatcgagccgatcacctgggaagtggtcgagcgcatcatcgagaaggagcgcccggacgcgatcctgccgaccatgggcggccagaccgcgctgaactgcgcgctggacctgcaccgtcacggcgtgctggacaagtacaaggtcgagctgatcggcgcctcgccggaagccatcgacaaggccgaggaccgccagaagttcaaggacgccatgaccaagatcggtctgggttcggccaagtcgggcatcgcccactcgatggacgaagccatggccgtgcagtcgcgcattgcccaggaaaccggtaccggcggctacccgatcgtgatccgcccgtcgttcacgctgggcggcagcggcggcggcatcgcctacaaccgcgaagaattcgaagagatctgcaagcgcggcctggacctgtcgccgacgcgcgagctgctgatcgaagaatcgctgctgggctggaaagagtatgagatggaagtcgtccgcgacaagaaggacaactgcatcatcatctgctcgatcgagaacctggacccgatgggcatccacaccggcgactcgatcaccgtcgctccggcgcagaccctgaccgacaaggaataccagatcctgcgcaacgcgtcgctggccgtgctgcgcgagatcggtgtcgacaccggcggctccaacgtgcagttctcgatcaacccgaaggacggtcgcatgatcgtcatcgagatgaacccgcgggtgtcgcgttcgtcggcgctggcctccaaggccaccggcttcccgatcgccaaggtcgcggccaagctggccgtgggctacacgctggacgagctgaagaacgagatcaccggcggcgcgaccccggcctcgttcgagccgtcgatcgactacgtggtcaccaaggtgccgcgtttcgcgtttgagaaattcccgcaggccgacagccacctgaccacccagatgaagtcggtgggcgaggtgatggcgatgggccgcaccttccaggaatcgttccagaaggccctgcgcggcctggaagtgggcgtcgacggcctggacgaaaagtcgacggaccgtgacgaggtcgtcgaggaaatcggcgaagccggccccgaccgcatctggtacgtgggcgacgccttccgcctgggcatgtcgctggaagaggtctatgccgagaccgacatcgacccgtggttcctggcccagatcgaagacatcatcaagaccgaaggcctggtcaaggcgcgcacgctggaaagcctgtcgaccgccgagctgcgcttcctgaagcagaagggcttctccgaccgccgcctggccaagctgctgaagaccgacgccaaggccgtgcgcgaagcgcgcatcgcccagaacgtgcgcccggtctacaagcgcgtggacacctgcgcggccgagttcgccaccaacaccgcctacatgtactcgacctacgaggccgagcatggcgagtgcgaggcgcagccgaccgacaagaagaagatcatggtgctgggcggcggcccgaaccggatcggccagggcatcgagttcgactactgctgcgtgcacgccgcgctggcgctgcgcgaagacgggtacgagaccatcatggtcaactgtaacccggaaaccgtgtcgaccgactatgacacctcggaccgcctgtacttcgagccgctgacgctcgaagacgtgctggagatcgtcgcgctcgagaagccggtcggcgtgatcgtgcagtacggcggccagaccccgctgaagctggcgctggacctggaagccaacggcgtgcccatcatcggcaccagccccgacatgatcgacgcggccgaggaccgcgagcgcttccagaagctgctgcaggaactgggcctgcgccagccgcccaaccgcaccgcgcgtgccgaggacgaagcgctgcgcctggccgaagaaatcggctacccgctggtggtgcgcccgtcgtacgtgctgggcggccgcgccatggaaatcgtgcatgagccgcgcgacctcgagcgctacatgcgcgaggccgtcaaggtctcgaacgattccccggtgctgctggaccgcttcctgaacgacgccatcgagtgcgacgtcgatgccatctccgacggcaagcgcgtcttcatcggcggcgtgatggagcacatcgagcaggctggcgtgcactcgggcgactccgcgtgctcgctgccgccgtactcgctgtcggccgagaccgtggctgaactgaagcgccagaccgccgcgatggccaaggcgctgaacgtgatcggcctgatgaacgtgcagttcgcgatccagcagaacgacggcgtcgataccgtctacgtgctggaagtgaacccgcgcgcctcgcgcaccgtgccgtacgtgtccaaggccaccggcttgcagttggccaagatcgccgcgcgctgcatggcgggccagtcgctggacgagcagggtatcggcgaagaagtcatcccgccgtactacagcgtcaaggaagcggtgttcccgttcaacaagttcccgggcgtcgatccggtcctcggacctgaaatgcgctcgaccggcgaagtgatgggcgtgggcaaggccttcggcgaggcgctgttcaagagccagctggccgcgggttcgcgcctgccggagaagggcaccgtgctgatcaccgtgaaggacagcgacaagccgcgcgccgttggcgtggcacgcatgctgcacgacatgggctacccgatcgttgccacccgcggcaccgcgtcggccatcgaggccgccggcatcccggtcaagaccgtcaacaaggtcaaggacggccgtccgcatatcgtggacatgatcaagaacggcgaactggcgctggtgttcaccaccgtggacgaaacccgcaccgcgattgccgattcgcgctcgatccggacctcggcgctggcccaccgcattccttactacaccaccatcgccggcgcccgcgccgcggtggagggcctgaagcacatgcagagcctggaggtctacgacctgcagagcctgcacgcctcgctggcctgaagccccgcaggtaaggcaagcggcacatcgccactggccgggcgcattgcgcccggtcaaggccaggaagcccgccggagttgctgccggcgggcttcctggcctaaactacgtcaaattcgccgatcgatgcggcgtgcccgcattcggtcctgtctgaaagccgcggttgagcggaagtgccctggcagcattggccagggatggctccagctccgctgcggctcatttttttgttgaacgaagacatgagcaccattccgattaccaagcgtggcgcagagctcctgaaggaggagttgcagcgcctgaaggctgtcgagcgtccggcggtgatcaatgcgatctcggaagcccgcgcacagggcgacctgtctgaaaacgccgaatacgacgccgccaaggaaaagcaagcctttatcgaaggccgcatcctggaagtggaggccaagctgtcggccgcgcagatcatcgacccgacccagctggacaccgacggccgcatcgtctttggcgcgactgtggacctggaagacctggagtccggcagtcccgtcagctaccagatcgtgggcgatgacgaagccgacatcgacgtcggcaagatctcagtcagctcgcccatcgcgcgtgcgctgatcggcaagttcgaaggcgacgtcgcaaccgtgctggcccctggtggcgagcgcgagtacgaagtcattaccgtacgctatatctgacgccggcccggccggcaggcttgcacctggcccggcccaccggaaagaccggcacgtgttctccaattcctataacaatctgccgccgctgccgcaccgcatcttcctgctgctgacggtggtgtgggcaggcagcctctggaccgtcggctacatggtggcgccgaccttgttctcggtgctgcccagccgcgagatggcgggcatgatcgccgggcacctgttccataccgaggccatcgtcggggtcaccatcggcgtgctgcagctggtgctgtgcaacgtgatgatccggcgcggtgcccaccgctatcgcggcctgcgctggctggtgctgggcatgttgtgctgcgtgctggcgggctacttcggcacccagccgttcatggccggcctgaaggaaaaggcgctggcgctgggcgtcggcgtttcggaatcgccttacaaggcgcagttcggcatgctgcacggcgtgtcgagcgccttctacctgctgcaaagcctgctggcgctggtgctggtgtggcgcgcttcggcgccgcgttcggccggggaatgaggccggccgccggcaccgccacgggcgtggcgtgccggcatcgggcgtcgcctggcagcgaccccgccatgcttcagctgatcgtgctcagcccagcgccttcttcttctggctggtcgggcgtgcgcgcgaacgcttcacattgccgccggcggtgacgcgctcgttgccaagcaccgtgacttccttgcgggtcggacggcggttcggcgcggcgctgggcttcttgaccgtcaccgtgcgcggggccgcgccgccacggcgggcgggggtgtggcggcccaggtcttcggcctggttttccttcaggcgcgcttcgcccggacgccagaccaccagcagcttgccgatatgctggatcggcgcggcgctgagctggtcgcagatttcctcgtagatggcgatgcgcgcatcgcgatcgtcgccgaacacgcggatcttgatcaggtcgtgggcggccaggctgcggtcgatctcggccagtacggcacgggtcaggccttcggcgccgaccatcacgaccgggttcagggcatgggcacgggagcgcaggtcagagcgctgggcagggactagttgtagagcaggcataagttggcgctgattattaggcgcttgaaatagtgatagagcgcgtgggcgctggaaatcgggcgctgcagcccgcgccggtcgtgacacggcgggtcgggcaaggacaggctgccgacggccgcccgggggcggcaagccggcagctgataaggcgagccggcggtcgggatgcggattggcgcgtattatccgtcaatccggcactgtcgggcagcaaaatcatcaaaacagtaggaaaaccttcgcgggcggcattgaccggcgggcggggcagggaacaggctggtaactggcatggcaaaaaacaagttcaatcattcgtggctgcacgaccacatcaacgatccgtacgtgaaaatggcccagcgcgagggctatcgcgcccgcgcggcctacaagctcaaggagatcgacgagcaggacaagctgatccgcccggggcaggtgatcgtcgacctgggcgcggcgccgggcagctggagccagtacgcccgcaacaagctggcggactcgccccgggccaaggacggcaggatcgatggcgccgtggtcgcgatcgacctgctgccgatggaaccggtcgccgacgtcactttcatccagggtgactttcgcgaggaatcagtcttccgcgaactggaaagtgtggtgctggacgcctccggcggtaacaagattgaccttgttttgtcggacatggcccccaatttgtccggtgtggccttcgccgatgcagcacggatcgagtacctgtgcgacctggcgctggaatttgcgcaggcccaccttaagccggagggggcattgctggtaaagtgcttccacgggagcggctacagccagatcgtggagaagttcaaacggcatttcaaagtggttgcgaaacgcaagcccaaggcgtctcgcgacaagtcttccgaaacctttatccttgggcgctacctcaaggcagtggattgaccggtctcgatacaagccagggcgaaaaaagaagcgtggaaagtgccccacccggtgctatcggcatcatagtttctctgtttccccccgagggcgggcgctgcattacaatgcagctatccgttggcaaggcaattgcaaaggagttcggccttgaataacaacctgtttcaaaaggcggcaatctggctcgtaatcgcgctggtgttgtttaccgtcttcaagcagttcgacaagccccgtgcgcaggacagcgtcacctattcgcagttcatggatgacgccaagaatggcaaggtgtcgcgtgtcgacgtgcagggccgcaacctggtggtctcgcctaaggaaggcgccaagtacaccatcatctcgccgggcgacatctggatggtcggcgacctgatgaagtacggcgtccaggtgaccggcaaggcggacgacgaacccaacgtgctggtgcaggccctgtattacctcgggccgaccctgctgatcatcgtgttctggttctacatgatgcgccagatgcaggggggcggcaaaggcggcgctttctcattcggcaagtcgcgtgcgcgcctgatcgacgagaaccagaacgccgtcacgttccaggacgtcgccggctgcgacgagtccaaggaagaagtggtcgagctggtcgacttcctgaaggacccgcagaaattccagaagctgggcgggcgcatcccgcgcggcgtgctgctggtaggccctccgggtaccggcaagacgctgctggcgcgcgccattgccggcgaggccaaggtgccgttcttcagcatctcgggttccgactttgtggaaatgttcgtcggcgtgggcgcggcccgcgtgcgcgacatgttcgagaacgccaagaagcaggcaccctgcatcgtgttcatcgatgaaatcgacgcggtcggccgccatcgtggcgccggcatgggcggcggcaacgacgagcgcgagcagaccctgaaccagatgctggtcgagatggacggcttcgaggccaactcgggcgtgatcgtgatcgccgcgaccaaccgtgccgacgtgctggacaaggcgctgctgcgtccgggccgtttcgaccgccaggtctacgtgggcctgccggacatccgcggccgcgagcagatcctgaaggtccatatgcgcaaggtgccgatcggcaacgatgtcgacgcctcgatcatcgcgcgcggcaccccgggcttctcgggcgcggacctggccaacctggtcaacgaagccgcactgtttgccgcccgccggagcaagcgcgtggtcgacatgcaggacttcgaggacgccaaggacaagatctacatgggtccggagcgcaagtcgacggtcatgcgcgaagaagagcgccgggccacggcttaccatgagtcgggccatgcggtagtggccaagctgctgcccaaggctgacccggtgcacaaggtcaccatcatgccgcgtggctgggcgctgggtgtgacctggcagctgccggagcatgacaagtattcgaagtacaaggacagcatgctggaagaggttgccatcctcttcggcggccgtgcggcggaagaggtcttcctcaacgccatgagcaccggtgcttccaacgacttcgagcgcgccaccaagctcgcccgcgacatggtgacccgcttcggcatgagcgattcgctgggtgccatggtctacgtggataccgagcaggatggcatgttcggcaagctgtcgtcgaagacggtgtcggaagccacgcagcagaaggtcgacgccgagatccgccgcatcatcgacgagcaatacgcgctggccaagcgcctgctcgaagagaaccgcgacaaggtcgaagccatgaccaacgcgctgatggaatgggaaaccatcgatgccgaccaggtcaacgacatcatggccggcaagccgccgcgtccgccgcgcagcgcgtcgggcccgaacggcggcggcagcacgcctccgggcggttcgccggtggcgccgaccaacgcgcccgccacggcctgatcctggttcgtccacagacgacgccgtagtgatggctgtgtagtgcctgtccctgaagccggtgcctggtgcaccggcttttccttttgcgcggcatctgccgcgcccggattgaatcaagcattcctaccttgcagcagacttctcagaccaggtatttccagtgcggccgttttcgctttgccctggaccagcgcccgctggtgatgggtatcctcaacgtcacgcccgattccttctcggatggcggccagcatgccagccgggacgcggcgctgcgccatgccgggcagatgatcgccgagggcgttgacatcatcgacatcggcggggaatccagccggcccggttcggcggcgctgccgctggaagacgaactggcgcgcgtgatcccggtggtggaagcactgcgcgactgcggcaagccgctctcggtcgatacctacaagcccgaggtcatgcgcgccgcgcttgcggccggagccgatctcatcaacgatatctggggtttccgcatgccgggcgcggtcgaggccgtggcggcggggcaggcgggcctgtgcgtgatgcatatgcagcgcgatccgcagaccatgcaggaagacccgcactacgatgacgtggtcgccgaggtggccgggttccttgccgagcgcattgccgtgctgcgcgctgccggcatcgacgatgcgcgcatctccctcgatccggggtttggcttcggcaagacacccgatcataatctgcgcctgctcggccaactgccgcggctggcgcttgagggcctgccggtgctggctggcatctcgcgcaagtccacgctgggcgcggtccttggtggccggccgccgcagcagcgtgttgccgccagcattgccgccgcggtgtgtgcgctggagcgcggagcatttatcgtgcgcgtgcatgatgtggagcagacggtggacgccgtgaagacctggtgggcggtgcgcaacgagtccgttggcgcggcctgaaccagccgcggccaccgcaggcagaacaacgatcagagtaaagaaagggaatcagcgaatgacacgcaagtatttcgggacagatggcgtgcggggcagggtcggcgaggcgccgatcacgccggacttcgtgatgcgcctgggccatgcggccggcaaggtgctggcccacggcgccaagaccgggcaaggcaagccgaccgtgctgatcggcaaggacacgcgcatttccggctatatgctggaagcggcgctggaagccggcttcacctcggccggcgtgcacgtgctgctgaccggcccgctgccgacgccgggcatcgcctatctgacgcgggcgctgcggctgtccgccggcgtggtgatctcggccagccacaatccctactacgacaacggcatcaagttcttttcggccgacggcgacaagctgcccgatgcggtcgaggcagagatcgaggctgccatcgaagagccgatggtgtgcgcgccgtccgatgacctgggccgcgcgcgccgcatcaacgatgcgcccggccgctatatcgagttctgcaagagcaccttcccgcatgagcaggacctgtacggcctgaaactggtggtcgactgcgcccatggcgccgcctaccacatcgcgccgcacgtgttccatgagctgggcgccgacgtggtttcgatcggcaaccagccggacggccgcaatatcaacgacggctacggcgccaccgcgccggccaagctggttgaggcggtcaaggcccatggcgctgacctgggcctggcctttgacggcgacgccgaccgcttgcaggtggtggatgccgacggccgtctctacaacggcgacgaactgctgtatctgatcgtgcgcgaccgccaggccgctggccaggcggtgccgggtgccgtgggcacgctgatgaccaatatggcggtggagctcgcgctcaagcgccagggcgtggaattcgtgcgcgccaaggtgggtgaccgctatgtgctggaagagttgaacaagcgcagctggactctgggcggcgagggctccggccacctgctgtgcctggaccgccacagcaccggcgacggcatcgtgtcggcgctgcaggtgctggccgcgctgcgccgcagcggcaagactctggcgcagttgctcgagggcgtaaggctgttcccgcagacgctcatcaacgtgcgcgtgcagaaaggcttcgactggcagtcgcatgccggcctgcaggccgcgcgcgcggcggtcgagcctgaactggaggggcgcggccgggtgctgatccgtgcctccggcaccgagccggtggtgcgcgtgatggtcgaggccgagcaggctgaaatggccgagcgcgcggccaggcggctggccgatgccttgggcgcctgatacgccgccccctgaccaggaacgccgggccagtcccggcgtttttttattctatagcgcaattaaccgccgtcatattgcgtcaccatgattgccggatggccgcggcgatcccttgctggaggccggttccaagaagatttaaagatgtcacggaattgtcatacagggagcatagagttcgtcttgtcaaaaatttgtcattcccaaccaatgttctctggaggacatatgaagctggtcaagactgccgtggcaggcatcgtttcgatggtggtggcgggtactgcgttcgcggcggaaattaccggtgcaggcgcttctttcccggcgcccgtgtattccaagtgggccgacgcataccaaaaagcaacgggtaataaggtcaactatcaatccatcggctcgtcgggcgggatcaagcagatcggcgccaagacggtcgatttcggtgcctcggacgcgccgctgaaggacgaggacctgaacaagcagggcctggtccagttcccgaccgtgatcggcggcgtggtgccggtgatcaacctgcagggcgtaaagccgggcgatctgaccatcacgggcgaagtgctggccaatatctacctgggcaagatcaagaagtgggatgaccccgcgatcaaggcgctgaacccgcaagccaagctgccgagccaggacatcctgccggtgcgccgcgccgacggttcgggcactaccttcatcttcaccaactacctgtccaaggtcagcccggactggaagagcgcggtgggcgagggcaccacggtcaactggccgggcggcggcaccggcggcaagggcaacgagggcgtcgccgccttcgtgcagcgcctgaacggcgccatcggctacgtcgagtacgcctacgccaagcagaacaagatgacccacgtgaacatgaagaacgcgtcgggtgccgtggtcaagccgggcgacgatgccttcaaggctgccgccgccggtgcggactggagcaagacctactaccagatcctgaccaaccagccgggcaaggaagcctggccgatcgcgggcgccaccttcatcctggtccacaagaaccaggaaaaggccgcgcagggtgccgaagtgctgaagttcttcgactgggcctacaagagcggcgccaacatggccgccgaccttgactacgtgccgctgccggaaaacgttgtgaaccagatccgttcgacctggaagaccagcgtcaaggacgcctcgggcaaggcgctgtactgatcctgacggcatcgccggccccgcgcgagtgcggggccggtggccgggctgcccgaaactggcccggacaccaggctcccgcccaggcgggagcggcgatccaccctgaattcccgacatggcgactaccccctccgagatccgcaacgtccagcccccgagccgcatgggcgacatcctgttcggcggcctgacgcggggcgccgcgatcgtgaccctgctgctgctgggcggcatcatcgtctcgctcgcgatcagcgcctggccgtcgatccagaccttcggtgcgcgcttcctgtggaccgcggagtgggatcctcccgccgatgtctatggcgcgctggtgcccatctacggcaccatcgtgacctcgctgatcgcgctgatcatcgcggtgccggtgagcttcggcatcgcgctgttcctgaccgagctgtcgccggcctggctgcgccgcccgctgggcacggccatcgaactgctcgccgcggtgccgtcgatcgtctacggcatgtggggcctgctcgtgttcgcgccgatcttcggcgagtatttccagaagcccctggccgccacggtgggccagctgccggtggtcggcaagctgttccagggcgcgccgctgggcatcggcctgctgtgcgcgggcgtgatcctggcgatcatgatcatcccgtacatcgcttcggtgatgcgcgacgtgtttgaagtcaccccggtgctgctcaaggaatcggcctacggcgtgggctgcaccacctgggaagtgatgtggaacgtggtgctgccctacacccgcgccggtgtcatcggcggcgtgatgctgggcctgggccgcgcactgggcgagaccatggccgtcaccttcgtgatcggcaacaccaacctgctggacagcgcctcgctgttctcgccgggcaacagcatcacctcggcgctcgccaacgaattcgccgaagccggcgccggcctgcacaccgcggcgctgatggaactgggcctgatcctgttcttcattaccttcgtggtgctggcgctgtccaagctgctgctgctgcgactggcaaagaatgagggaaccaaatgagcgcgagtcaagctgtgtcaaccgcatcgatcccggcggtccgtgccgacgcggatgccatccgcacccggctgcaggcgcgccgccgccgcaccaacctgtatgcactgaccgcctcgctggtggcgatgggcttcggcctgttctggctggcgtggatcctgtggaccaccgtcacgctgggcgtgggcggcctgtcgctggacctgttcacgcagatgaccccggcgccgaataccgctggcggcggcctggccaacgccatcttcggcagcttcgtgatggtcggcatggccacgctgttcggcacgccgctgggcatcctggccggcatctacctggccgagtacggcaagagctcgccgctggccagctttatccgctttatcaacgacatcctgctgtcggcgccgtcgattgtgatcggcctctttgtctacgcgctggtggtgacccgcatgggccacttctcgggctgggccgggatctgcgcgctggcgctgctgcaggtgccgatcgtggtgcgcaccaccgagaacatgctgaacctggtgcccaacgcgctgcgcgaggcggccttcgcactcggcacgcccaagtggaagatggtgctgtcgatcacggtgaagtcatcctacgccggcattgtgaccggggtgttgctggccgtcgcccgtatcgccggcgagaccgcgccgctgctgttcaccgcgctgtccaatcagttctggaccagcgacctgaacaagccgatggccaacctgccggtgacgatcttccgctttgccatgagcccgttcaccgaatggcagcaactggcctgggcgggtgtgttcctgattacgatcggcgtgctggccctgaatatcctggcgcgcatcctgttcaagaaataagcggccggaccacgcaaaccgtcccgcccaaagactgcaagcgagaaacgcaatgacctccaccgtcatcgacattcccgattcggtacgcgccaagatcgacgtgcgcaacctgaacttctactacggccagttccatgcgctgaaggacatcaacatgtcgatccccgaccgcaaggtcacggccttcatcggaccgtcggggtgcggcaagtcgacgctgctgcgcaccttcaacaagatgtatgcgctgtatcccgagcagcgcgccgagggtgagatcaacatggacggcgacaacctgctgaccgcgcgccaggacatcgcgctgctgcgcgccaaggtcggcatggtgttccagaagccgacaccgttcccgatgtcgatctacgacaacatcgccttcggcgtgcgcctgttcgagaagctgtcgcgctcggagatggacgaccgcgtggaatgggcgctgaccaaggcggcgctgtggaacgaggccaaggacaagctgcatcagtccggctacggcctgtccggcggccagcagcagcgcctgtgcatcgcgcgcggcattgccatccgcccggaagtgttgctgctggacgagccgtgctcggcactcgatccgatttccaccggccgcatcgaggaactgatcgcggagctgaaggacgagtacacggtcgtgatcgttacccacaacatgcagcaggcggcgcgctgctcggactacaccgcctacatgtacctgggcgaactgatcgagttcggcgagaccgagaagatcttcatcaagccgcaccgcaaggaaacggaagactacattaccggccggttcggctgatcgttaccgcagggcgtagcatatccataagcggccaggagaatcccatgccagacaagcacctgtcgactcagttcgacgccgacctcaacgcgatcaacaccaagctgctgcagatgggcggcctggtcgagtcgcagatcgagctcgccatgcgcgcgctgtccgacttcgatggcgagaccgccgaccaggtcatcgcccgggagatccagctcaacgcgctggaagtcgagatcgatgccgactgcggcaacatcattgcccggcgccagccgaccgcgcgcgacctgcgcctggtgatggccatctccaagaccatcaccaacctggagcgcgccggcgacgaggccgagaagatcgccaagcgcaccaagcacatcatggaagacgcgtcggcgcacagcatcaattacgccgaggtcaagctctcgggcgagatggcgatctcgctgctgcgccaggcgctggacgcctttgcgcgcctggacaccgtggcggcggcgcgcatcgtcaaggacgacaaggccatcgacgaggaattccgcggcttcgtgcgcaagctgatcacgtacatgatggaagacccgcgtacgatctcggtcgcgctggatttcctgttcatcgccaaggcggtggagcgcattggcgatcacgccaagaacatcgcggaatttatcatttacattgtcaaggggacggacgtccgccatgtctcgcgcgaggacatggagcgcgaagcgctgagctgaactcagccgcccacggagaacaattacatgccaagcagtattctcgttgtcgaagacgaaccggcgatcgccgaactgatcgccgtgaacctgcagcacgcggggcactatccgatccgggcctacaacgccgagcaggcgctgtcgctgatgagcgatgtgctgcccgacctggtgctgctcgactggatgctcccgggcaagtcgggcgcgaacttcgccaaggagttgcgggccaacgaccgcacccgccagatccccatcatcatgctgaccgcccgcggcgaggagcaggacaaggtgatggggcttgaggccggcgccgacgactacgtcaccaagccgttctcgcccaaggaactgctggcgcggatcaaggcggtgctgcgccgccgtgcgccgcagctgaccgacgatgtggtggccatcaacggcctgcgcctggacccggccacgcaccgtgtcaccggccaggacgacagcggcgcgatcaagctggagctgggtccgaccgagttccgcctgctgcacttcctgatgacgcatccggaacgcgtgcacagccgctcgcaactgctcgaccaggtctggggcgaccatgtctttgtcgaggagcgtaccgtcgacgtccatatcaagcgcctgcgcgccgcgctcacccccggcggctacagcaatatgatcgaaaccgtgcgcggcagtggctaccgcctggcgcgcacgcccggcgcctgacgcgccggacatgggagggcggctcgacgtgctgccctgccagagcccacgctgctggcagggcgcggcgcattcgtggcacactccgtcgcaaccctgcagccttccgtggctgcgagcctgaaccctgcgcatgaatgtcatctgggcccgttccgtggccatcctgatcagcctgctggtgctgtccgccggtgtttacctggccgtgggcccggtgccagcgctggcgctggcatgcgtatcgctgctcgggctgctgttctactacttgtaccagatcaaccgcctgtggaaggtgcttgatgcgccggtctacggcgagatccccagtgcactcgggctttggggcgaggtgtattaccggctgcaccggctggtcaagcgctggcgcacccaggtgctgcaggtcgagcagcagcacacgcgctttatccaggccatccaggcttcgcccaacggcgtgctgatgctggacgacgccgaccagatcgagtggtgcaacgacgtggccgagcagcatttcggcctgaacgcgcggcgcgacgtgcgccagcgcatcacccacctgatccgccgccccgagttcgtccactacctgacccggcagcgcttcgatgacccactggtgatgcgcgacatgggcgagcacaagcacagcgtgatcgcggtgcagatcctgccctatggcgacaaccgcaagctggtgatcacgcaggacatcaccaagctcgaaaacaccgaggcgatgcggcgcgacttcgttgccaacgtgtcgcacgaactgaagacgccgctgacggtgctgaccggcttcctggaaaccgtgcgcgacctgccggtgtcggaagacgaccggcgccgctacatcgacatgatgctggcgcagtcggtgcgcatgcagagcatcgtcgaagacctgctggcgctggccaagctggaaagcgatgcgcagccgcccggcaatgacatcgtgccgatccgtgccatggtggcgcacctgacccacgacgccgaggcgctgtcgcagggacggcaccaggtctcggccgagatcgacccgaccgtcggcatgcgtggcgccgagaccgaactgctgtcggcgctgggcaacctggtgtcgaacgccgtgcgctacacgccggacggggggcgcatcaccatcaggctggcctgggaagagggtcatgccgtgttctcggtggccgataccggcctgggcatcgctcccgagcatattccccggctgaccgagcgcttctaccgcgtggaccgcagccgctcgcgcgacaccggcggcaccgggctggggctggccatcgtcaagcacgtgctgtcacgccaccatgcggacctgcgcgtgaccagcgaagagggccggggcagcgtgttccgcgtgatcttcccgcttgaacgcagcctgcgttcggccggggagggcgcggacatgccagcgccaggcagcggcccgaccgcgccgccgcagtcgccggacacctcgcggcgcgccgcctgacccgtaaaggaaaaccccgccgcggcggggttttgcatgttatgcctcagggaagcctcctcggctcctggcgcaaggtgggcaacagaagcccgctcagggcatccccccaaacatcaccagcatatcgttctgactcacatgtggacgcttcgagcgcgtctgcttgcgtgcatagttgccgtccggctgcatgatccacgccgaggcgttgtcgcgcaggtgcacctgcaggctttccttgatgacgcgtgccttcagcgccttgtccagcaccgggaaggcaacttccacgcggcggaacaggttgcggtccatccagtcggcgctggacaggtacagcacctcttcgccgccggcgtagaagtagtagacccggtggtgttccaggaagcggccgatgatcgagcgcaccgagatgttctcggacatgcccggcacgcccggcatcagcgcacacacgccgcgcacgatcaggtcgatcttcacccccgcgcgcgaggccttgtacagctcgtcgatgatcgatggctccagcagcgcgttcatcttggcgatgatgcgcgcgggcttgccggcgcgcgcgttgcgggcctcggcgcggatatggtcgaccaggttgctctgcatggtgaagggcgactgccacaggtggttcagccggatggtgccggcggtgccggtcagcagctggaacacgtgatgcacgtcttcgcagatctcctcgttggccgtcagcaggccgaagtcggtgtagaggcgggcggtgcgcggatggtagttgccggtgccgaggtgggcgtagcgccgcagcttgacctgcttggccttggggccggtgggctcgcgccgcacgatcagcagcatcttggcgtggcacttgtggccgaccacgccgtagatcacgtgtgcgcccgcggattccaggcgctcggcccagttgatgttggtttcctcgtcaaagcgcgccagcagctccaccaccacggtcacttccttgccgttgcgcgcggcagtcatcagtgcttccatcaccagcgactcattgccggtgcgatagacggtctgcttgatcgcgaccacgttggggtcggccgcggccagctgcagcaggtcgagcacggaactgaagctctcgtacgggtggtgcagcaacacgtcctgctggcgcatcacgtcgaacattgacgcgccggcggagaaggccttgaccggcgcgggcacatatggcgcaaacttcagcgcgggccggtccaccatgtcggggatctgcatcagccgcaccaggttcaccgggccggaaacacgatacaggtcctgctcggcgaggcccgattccagcagcagccggcgtgccagcggtgccggcgtgtccgacgagacttccaggcgcaccgtgtcgccgaaatggcgcgtgggcagctcgccctgcagcgcctcgcgcaggtcggtgatctcgtcttccgagacgaacaggtcggagttgcgcgtgacgcggaactggtagcagccgtgcacggcaatcgccgggaacagctcatgcacgaagccctgcatgaaggacgacagcatcacaaagccatacgggtagcccgacagcttctccggcatctttaccacgcgcggcagcgcgcgcggcgcctgcacgatggccaggtcggcctcgcggccgaaggcgtccttgccggacaattccaccacgaagttcaggctcttgttgagcacgcggggaaaggggtgggcgggatccagtgcaatcggggtcagcaccggccccagttcgcgctggaagaactcgcgcgcccattcgcgctgggcgtcggtccaggtggtggtcaggtggaaaaagaccccctctttttcaagtagtggaaaaatggtgttctgcagcatgtcatactgcgaagccacaagccgttgcgtgcgctcggtgacgagctggtaggtctgctggaatgacaggccgtccggcgtcagccccgaagcgttgtcgcgcatctgttccttcaggcccgccatgcggatttcaaagaactcgtccaggttgctggacacgatgcagatgaatttcagccgctccagcagcgggaccttcgggtccgccgcttgcgccagcacgcgggcattgaattccaggatgcccagttcgcggttgagcagcgtactggacggagtcgtcgacatgagcatgaccttcttttggtaatgtggcgactttttcataaaaacgtgtcacttttatgacagtttgattttgtcatgatgcagacatgatcaggacatatttttcccgggcgcgaacgccggcaggccaaggcaccagagcgcacctgccgcgccacgcaacgccaacgcgaaccagccctcctagcacacgatgaataacaccccacgcctgctggctgccgtcgatatgggttcgaacagcttccgcctgatgatcgggcgggtggacgagacccccacggccaatggcccggccagccagatcttccaggttgacgcgctgcgcgagccggtccgcctggccgccggcctgacgcccgacaaatacctggaccagcccgcgcggcgccgcggtatcgatgcgctgcggcgcttcggcgaccggctgcgcgagttcgcgcccaaccaggtgcgcgccgttgccaccaacacattgcgcgtggccaagaacgcgtccgagttcctgatcgaggccgaaagcgcgctgggcttcccgatcgaagtgatcgccgggcgcgaggaagcgcggctgatctacctcggggcctcgcacgacgccccggcctgccagggcaaccgcctggtggtcgatatcggcggcggctcgaccgagttcatcatcggcaacggctaccagtccaagctgatggaaagcctgtatatcggctgcgtgtcgcacagccgccagttcttccccagcggcaacgtcgatgaatacgcgatgaagcaggccgagctggccgcgcgccgcgagatccaggtgctggtgcgccagtaccgggccacgggctgggagcaggcggtcggctcgtcgggcacggcacgcgcgctggccgagctgatcgaactcaatggcatgaacgacagcaccgccgagcacggtatcacgcgcgaagggctggagcgcctcaagcgcgcgctgatcaaggccgagaacaccaaccgcgtcaagctgaccggcctcaaggcggaccgcatcccggtgctgccgggcggcttgtcgatcatgctgggcgtgtttgccgaactcgatatcgagcgcatggatgtcaccgacggcgcgctgcggctaggtgtgctgtacgacctgctcggacgcagccaccacgaggacatgcgcaccgtcacggtggaccagttcatgcgccgctatggcgtggaccgggcccagtccggccgcgtgcgccgtgccgcgcagacgctgctgtcacagttcccggagccggccaacgaacggcgcgaggacaacctggcgctgctgggctgggccgccagcctgcatgagaccggcatgtcgatctcgcacagcggctaccacaagcattcggcctatatcgccacccacgccgatatgccgggcttttccaagaccgaccaggcgcggctggcgacgctgctgctgggccatgcgggcaagctcggcaagctgtcgggcagcggcaggttcgtcgactggcgcatgctgttcagcctgcgcctggcctttgtgctgtgccgccgccgctcggacgtggccttgcccgatatccgcgtgagccagttggccgaggcgctggacgaaggcttcaccgtgcgcttgccgaaggcgtggatcgaggccaatccgctgatcgaatacagcctggcgcaggaggctgatgaatggcagcggatcggcaagcgctacaaggtcatctatgactgagcgcagtgcggagggcggccgccggggcggcggccgctgacaggcagctggcgccgctcaggcggcgttgttcaggccgaggaagtgacgggcgtagcgcgggttcatgtcgttcacgcgcagcagcgtcaggaagtcagccacgttgaagtccggatcccaggccggctggccgcagatctttgcgtccaggcgcaggtagcccttgatcagcgcgggcggctcgacgtccagctgctggttcaggtcctcgaccggcagcggcacgcgcgggaaggcgtggtattcgattggcgccagcgagcgctcgctgaacagccggtgcaggctggccgcgtagtggccgccgtcgttcatcggcacgctggcgcagccgagcatcgattcgatgccccaacgctgcaggtactcgcccaggccgccccacagcgccatgatgacgctgcccgaacggtagtcgcggtgcacacaggagcggcccagttccagcatcttggggcgcaggtggcccaggcgtaccaggtcgaattcagattccgcgtacaggcagcccaggcgcttggcctggtgcggcggcagcacgcggtaggtgcccaccacgcgcagcgtggccatgtcgcgcacgatcaggtggtcgcagtaggcatcgaacatgtcgatgtccagctccggcaccgaagaggtcaggcgcgcgcccatttcctcggcaaaaaccttgtagcgcaggcgctgggcttcgactacttcgtcctggtggcgcgcccacgccacgctgagaacaggcgattcatgtgccggtgtatctgattggcgatgaagacggctccgcgccgtctggccaccaaggccattgggcagagagtcgaaaagcggctgggtgggcgtcggcagatctcgcatcagtatgtccttttggtgacgaaactgttgcgatgcaatgtagtgagagtgggtgacattgccgtgacccgcggatgacggttccgtgacgtcacctgccagggcggacggtcgggcgctttcgggcgatgggtcagggtgtgagtcgcgatcctcgacgtcaatataacgatcggccgggccattcatggggaatctccgtgacacctgctatcggcaccggaagaggcgccaaggccactctacttacgggagattccgcccgccatcagctatttctgattttggcgggacaaaatgggccaggtgccgtcaggcggcacctggcatgcggggtggggcggggctcagaggaattcggggttgatgacggcgcgcagcacggtctgcgcctcgctttcgcgggtgcggccggtcaaccaccagatgccgctcttgcgcacgctccagttcatttccgagccggccagcagcaggctggcgacgcggccgatccagggctggtgcccgactaccaccacgtgctcggggcgttccggccactcgactgctgcaagcactgcgctgacgtcggcgccgggcgcaagggcgtcactgatctccgcctcggcagacagcgcggccgccgtttcgcgggtgcgcagcgcagggctgcaaaggacgcgggtgtcggccggcagatgcgcgcgcagccatttggcggatacctccgcctgcttgcggccgcggcgtgtcagtggccgctgcaggtcggcatggcggctcaggctgagcgcgtcggggaggtcttcggcttcggcgtggcgccacaggatcaggttcatgtcggacggggcaatgagcgagcttcgagtatggtgaagcggcccgaccggtgcaagcgccagctggcccgcgccggtgcgcaggccaggctgcacgcggcgcgtaaacggaagcaggctgcctgtcgggcagcccgcaagtgtgtccaggcgcggtgtcagcggcgtgacagcgcgtcggcgcacaacggccgcggcgcgggcgacagccgcgcatgcggtatcgccggggccgtgcagaaactcaggacttgtggcggaagttgatgcgtcccttggtcaggtcatagggcgacatttccagggtgacacggtcgccggccaggatgcggatgcggtgcttctgcatcttgcccgaagcgtatgcccagatttcgacgccgttttccagcgtgacccgatagcggttgtcaggcagggcttccgacaccacgccgccaaattcaatgagttcttccttagccaatctgtcttccttttcggcagcccgtgaaggctgcgtggttgcgattttaaaaatcctgttcggttcgcccggtacggcgcggaaccgcggcatgtttcgccgattgcggcgaagcgcgccttgggttgttcggggcaagctcacgcggactgcggcgcctgatgctcggtcctgtcagcggtatcgcccaacgggcgcggatggcttgggcgacggcctggccgctgacggccggggaggccgtgtgctttgcggagcaggcgggcaggttgtacccggtggttcgccagtttggtgtcgtcgcggaaggcccgcgccggcggctgctgttcgctcgcgaagagcgcgctggtgagaacgcccggttacagggatgcacggacaccccgggggctactttgacattgtatcacgtacgcagttgcagcatggccggcacgttgcggcagatggccggccgcggcggttgcaccgtgccgccaaagtcggcaattcatgtgccttgaaaggcgcgtcttgcggtctggccggcttggtatttgccccatatgagctagaactaactcgtacggccttgccgggccggatctcgcaaggagactgccatggaactccatctggaatcgcaccgctacgttcgctgccggccggactggcgggccgccgtggtggcggggctgattgccggcgcggtctacatggtgctggaactgctgacggcgcgcttcctgctgtaccagggcgcctggggcaccgtgaagatggtcgcggccatcatcctcggacgtgaagccctgtctgctgatgccttcaactggacagtcgtgctttcggcggggacggtgcacttcgcgctgtcgatcatcctggcggcggtgctggcgatgattctgtcgtcattccgcttcgattccagtctgtggctggcctcggtggtcgggatcgtgtttggcgtggtggtctacctggtcaatttctatctgctggggacctacttcaactggttcgacgaggcccgcggctgggaaagcctgttcgcccacgcgctcttcgggttggtggcggccgacgtctattgcaatctcgagagacggcgtggcgaaacggggcagcagcctgcctgaaccaggagatggagatgggggagggggtagcagccggcatcctcccggctggcgctctttcagctagcccatctggttgatatgacgtttaacgcgctcgcactaacctagaggcaaacgatcagagcggccgccgccaaccatgcccgcgggcggctacaccggagtaccgagcccatgcgggttgcaatcgtcagtaccgaaaccaccgggctcacgccagcggacgagcctgtcagcatcggcctgttgcttgtcgaagtggcgccgcgggctggcacgctattgcgggagatcactgactattacggttcgcaggagcccaccgtgccgatcggtgaagctgccaccggcacgcacgggttgaccgcggagatgctgcgcgggcggcgctttgacgtcgatgccatccgcgccatcgtcgacgacgcggatgtgctggtcgcccacggcgccgaattccacgcgcgaatgctgggaaaagtgcttcccgacatccagcacaagcgctggcgctgctcggtgcgccaggtccgctggtcccagtacttccatgcccccaaccacaagctcgatacgctgtgcgagcacctgcgcatcttccggccccggccgcaggttgcgctggatgattgcctggcgctgtccaggttgctgttccagcacatgggtgcagccgaccaagccacgcccatgggcttcctgctggccgagtccgacttcgtgccgcgtattgcgatcagcgtgcctgtgccatcggcgccgccgccgttacctgcggtcccggccgacgccggccagtcatggatgccaaaggttgagaccagccatgctggcccaagccgggggctggtcatcgttgcggtgatgctgatgctgttcgcgggggcgctgatctggccggacttgctgcagtggtgagaacagacctgtacggcgcttggaggccgcttggctgaaaagaaaaacggcctggatctttcgatccaggccgttgtttccactgggtatttctggtcggagcgataggattcgaacctacgaccctctgatcccaaatcagatgcgctaccaggctgcgctacgctccgaagcccgccattgtagccgggccccgcgatcgcggtcaatctaatgtgatgatgcccgctctggcgcactcagccttgccggcctgctcccccttctggcggggacgctttggcttgacttgggtttgcgcgctgggataatccgcacaccgcaccagtccgaccggcgtgcttttgggaacgcccggtttgcctattccttccggactgacctgatcaccacaacaataacggcgctcccgcccgcggcgggcgcctcgacgtgtttgcgtctgccggccggcggcgccaggcgttctgaaaccgggtatgcggctttgataacaacggtccgacacaggaccggtaaagagcaggtaacagcggcgccatgcggcgcaccgcttgtcaccttggacgggaatgaagatgtttcagtcgcacatagttgtgctcatcgcggggttgttcgccctgcagatggctgtggtttgcgtggtgttgcgccgctcggcgggcatggatcgcagcggcctgacgtcgtgggcgctgggaagcgtgctggccgcaatggcagcggccctggcagcggtgcaggaactgcgcccgctgtggctggtactggaatcgagcgacctggcactgctggcggcgctctcggtcatggcagtgggcgcgcggcatttcgcgggccggcccggccgcgccgcgccgttgctggcgctgaacctggcagccgcggcggcggtggcctggcacgacctggcgcctcaatatcttgccgtgccgccgctgatgccggagatggcaccgctgctgacgatgtgccacatcgcactgctgctggacctggcccgcagcgcgtggccgtcggtgccggccacgcgcggcaccggccggctggcagcgttgtcgctggtattgatcgtcatcgccgcggcggccatcaacgcatggaccgtggcgctgccgctggcggcagtcatgcagggcggcgcctggccgcggccgatgccgtgggacggcgagctcgccatgctcaatatctttgcactggtgggcgtgtcggtcagctttgcgctgatggcacacgaccggctgcggcgtatgctggagcggcgcgcgcgccatgacgacctgaccgatgtgctgctgcgcggcgcgttctgggaagagctggaggcagcctgcctgcgcgccgagcggcagcgcaagcccctgacggtggcctttgtcgacctcgatcacttcaaggcaatcaatgatgtctacggccacctggcgggcgacagcgtgctgcggcatttcgccgggcagctgcgcaagaattttggccagctcgaggtggcggggcgcctgggcggcgaggaatttgccatcctgatgccggatacggcgctggagcagggccggctggcctgcctgcggctggccacggcggtgcgcgccacgccatgcccgtccgagcccgatccgatcgcctataccgtcagcatcggcctggcggcgcggcagccgggcgaaggcgccgatgcgttgatgcgccgtgccgaccgtgcgctatacgacgccaagctgaaagggcgcaactgcgtgtccctgcatccggcaggcagcgaggcgggcaccgatggcggcgcggccgatggccactacatcacgcgcggacagccgcgcgccgcatcctgacctgcgccgcttgtcactgcgcagcggtgctgcggtagaatgccgccttcgcgtccttagctcagttggatagagcactcgccttctaagcgagcggtcagaggttcgaatcctctaggacgcgccagtgaaatcaagggtttgcggggtgtcgcccgcgcaggccgaagcgcgccccacgtcagtgggcaatctgcgggcaattctggccttcgatgcgagtgccatggagctcagaacggtcagtggccgactttatcggctgcgcgacgccgccagcgtggcggacctctcttcgcgtcgtggaccaccatgaagccccctccgccgatattgccggcattgggtagggctaccgcgtgcgcgaagcccaccgccaccgccgcgtccaccgcgttgccgccagccttcaggatgtccaggccgatccgcgtggccggttcctgctccgtcgccaccatgccgttgcgcgccaccaccgggtggaacacgtccacgtccatgtcgaattcgtaggcggcgctggcggcctgtgctgtcgcggtggtggccggcgccaagacggccggatctgcaatgacgggcgcatagcgcggggcggcggtctgtgcgataggggcggtgttgcagggaagctctcgcaaaaggacccatcccgtttgcgaaggttttcgagtgccccgacgtgacccgccctttggccggtcggcgacgcatgccaaacatgcggattggcaatcggagattggatggaaaccgccgggggtgcgtcgaaaggcttatgtgaggccgtcgtgactgttagccacgtctcgccccgccttgcgcgcatttcagcccattaatggcggcaacttctcgcgccgtctacgtggcagcaatccctcctgttttgatgcaaggaatgcatcaattcatcgaaacattgcaattcccctctgcaagttgtctctgcaaactggcatcaattcgcctttcccgttcgcggggcagggggaggtgacgacaataagccgaaatggggagataggatgggcatcgaacaagaacggaaaagtcggttaaacgggaagttggcggccggggcggtccttggaattgcgatcactactactgttcaggcacagagttcgtccggagtaagcctgtacggcatcatcgataccaccattcgctactcaaacaataaccagggcgacaataagttggctgcgttaaccgacggctatttcaacggctcacgctggggcatgcggggcaacgaggcgctcggaggcggattgtccgccatcttcaatttggagagtggctttgatccctcgaccggcgtatcgcagcaaggcaccacaacggcaaactatggacagcagagtaccggcggtcaggggcgtttgtttggaaggcaggcatgggtcggattgaaccacgagcgcttcggtaggctaacgttcggccggcaattcaccaccggctacgatgcgaccgcccgctttcagcctaacggtcaccccaatctggacgcagtcaccatctttaacggctatacgggaccgcgccaagacaacatggcgaaatacgtcggacaatggggagcgctatctgcgggagcgtattacacctttggcgaagtgtcgggtcatatgaagccgagctctagttacggcgcaactctcggctataagcagggaccggtggacgtcggtggcttctggcagcaggccaacgcgctaaccacgcccgagtcgagaaaagtctggggcgtgggtggcaactatcaatgggggatagtcaagctaaccttcggctatctaaacaatcgattcgatgtgagcccgacgcgaaacgatgtattcagtggcggcttcgctgtggcggctacctctgctctcacgctatccgttgcgtcgcactacgaccgccagcgcaatgcctccggcagccgcattatggtgaccggcgtcgcggactacaacctttcaaagcgcactgacatttacgccgaaattgatttcaatcgcatcaacggtgcctatgcgctgcccaccttcatgggagtgaaaggcagcaaagtcggcggtggcatcggcttgcgacatcgcttctagagcggtccattgttctgccaggcggctaactggtgcgtcggcgcttcaatgtgcccaactattcttcgaattgatctaactccgctggtcccgcgcgtgaacggcattcgggctagcacaaatgcaaggagccagcagtggacgaacaggcagttgaccccaggacgtggattggacgcagcgagcagtgggaggacacagtcactgccgcgccgatcgcagcgctgcgtgcgacgatggattaccccgcagcagcgcagacagcaggcactccattgccgccactgtggcattggctttatttcttacccatgcatcgtcaaagcgaaattgggcacgatggccatgccaagcgcggcggctttctaccccctgtgccattgccccgccgcatgtgggcaggcggccaattcgagtttcgccatccacttcgggtgggcgacaagatccagcgcacctccgtcatcgacgatgttacaagcaaggaggggcggaccggaaagttagtatttgtaagagtgcgtcatgagatccgcgccatcggtactgcggaaccggcgttagtggagtttcacgacatcgtttaccgagaggcacagcagtcgggcgaggcgcctgtcatgccccaagcggcgcccgcggaagcggcttggcagcgccaaattgttccggacgacgtcttgctgttccgctattcggccctgactttcaatgggcatcgcatccactatgaccgtcgctacgtgacagaggtcgaaggctaccccggcttgattgtccacggcccgctgatcgctacgttgctactggatctgctgcggcgtgaattgccccaggcagaggtcgccagctttcgattccgtgcggtgcgcccgaccttcgacctgcatcccttccgggtcagcggtcaaccgcagtctgacggcaaaacagttcgcttgtgggcatccgaccacgagggctggctgaccatggacgccacggcagtccttcgctgatttcgctttacggaagatcctgatgcaacccctcaaagacatcacggttgtcacatttgaacacgcgattgcggcgccttttgccacacggcagcttgccgatctgggtgcacgagttattaagatcgagcggcctggggtcggcgatttcgcccgtggttacgatgagcgggtccgtggcctggcctcgcatttcgtctggacaaaccgctcgaaggaaagcctgacgctcgatgtcaagcacccggccgcggctggcgtattacagcgtctgattgaggaaaaggcggacgtggtggttcagaacctcgcaccaggcgccgcagcacggcttggtctgggctacgaaacgctttccgccgtaaagccccaaatcattgtgtgtgatatttcgggctatggcgacaacccgaagaatcctggaccataccgcgacaagaaggcctatgaccttctcgttcagagcgaagccggatttctgtccgtgacggggacgcctgacgtgccttgcaaggctgggccttccattgccgatatcgccgccggcatgtatgcctacacaaacattctggccgctctgttacaacgcaatcagacgggccgagggcaacgtattgacatctccatgctagaggcgctggcggaatggaatagttaccctctctactacgcttttgatggggcacagccgccgcagcgcacgggcgcaagccacgccacaatctacccctatggaccgtttccggctggcgatggggcgacagtaatgttggggttgcagaacgagcgggaatgggcaaacttctgcaacacagtgctccagcggcccgaactgatcgaagatccccgctttagctcaaactcgagacgcgtggccgagcgcactgcactgaggcagatcatcgtagatgcctttttgcctctaaccggtgcccaagtggtgcagcgattggagttggcccagatcgcgaatgccagtgtcaatgacatgcagggggtgtgggagcatgctcaactcaaggcgcgcggccgctggactgaagtcgactcgcccaagggcatgctgccggctctcttgcccccaggaacctggaacgaagggccgcgtatggatccgataccggcacttggtcagcacaccgacacaattctcgcggagcttggatacgcctccgacgaaatcgccgtgatgcgcgctgatagcgttgtgtaacgcctggcctagcgcaccatacatgtgacctaacggagacataacctatggcttccaccatcattgattcccgcatttttggcgacatgtttagcgacgcgcgcatgcgcgaagtgtggtccgatgaaaaccgcacggctaaatacctggacatcgagcgagcattggcaaaagtgcaaggtgagcttggcatcatcccgcaggaagcggccgacgagatcgtcaagaattgcgaactttcccaaattgactgggttaggctcaaggcaaagactgaacagatcggatatccgattatcgcggtggtcaaccagatcaacgcgaactgccgggatgggcttggcgaattctgccattggggtgccaccacccaggacattaccgacacagcggcggtgttgcagatgcgcgagggcctggcactgatcgagtcggatctcgacgacatcgctgacgcgcttgcgacgctggcgaagcagtaccgcgacacgccggtgatcggtcggtccaacctgcagcaagccacccctattacgttcggctacaagatggccagcatccttgctggcatcgagcgccaccgcgagcggctacagcagttgaagccgcgagtgctaatgggtgagttcggcggcgcatccggtacgctttcctcgttgcagacgggagccatggaaacacaggctgcgttgatgaaggaacttgggctggcgcagccactgatctcctggcacacggtgcgcgatacgattgccgaagtgggcgcgtttctcggactcgtcggcggctcgctcggcaagatcgccatggacgtgaagctcatgatgcagaccgaagttgccgaggtgttcgaaccctttgcgccggggcgcggctcttcatcgaccatgccgcagaagcgcaacccgatttcgtgcctgtacatccacgccaacatctcggttgcacggcagcacgcggcggccctgatggatgcgatggtggctgatcacgagcgttcaacaggcccgtgggagatcgaatgggtatccctaccggagattttttgcctgatttccggtgccctgaagcaggcgaagttcgtgttgcagggcttggaagtggacgcggctcgcatgcgcgcgaatatcgacatgacaaacgggctagttatgtctgaggcggtgatgatgggcctgggtccatatattgggcgcgagtatgcgcacgatctggtctatgacctttgccgcgaggccattgccaacaaccgacccttgatcgacatcctcgcggcacatccggaagtaagcagccacgtgtcacgcgcacaactcgaggccatgtgcgatccacgcaacaatcttggccaagccggcgtaatggtcgacagggtactggctagccggcgctaagacgcactgccaagaagagcatgccggcctgccgtccgtgagccgtcggcgcgccaaggtcggtccgcggggcgattatttgccacgccgtttgccggcgggcgcgccacgtcttggtcgtgtttcgcaaaggaagtcatagagctgctgcgcggcaggtgttaaggatcggctcttgcggcgtattaacccaattttgcgcgtcacgaccgggtcggttagtgggacactaactagaagcggatgatctggacctggcatggcgatggatggcaccgctgcgatgccaagcccggcttcgaccaagcccaaggtcgtggtgacgtgctgcgtctcgtagatactctgcggcaatcgtgacacgttcgaaagcgcctgatcgaggagcagccggttgccggaagctttgctgaccgagatgtagtcatattcggcgaggtctgcccaggtcacttgccgtcgctccgcgagtggatgatcgcgacggcaggccgcaacgaaccgttcctccagcaagggcctgaattcaatgtctggctcttggcctcccacgaaatcgatcccgaaatctgcttcactgcgcgacaccgctgacagtacctcgtttgcgctggcatccagaatctttacccgaatcttcggatactgcgcgtggtaacgcgagatgacttgcggcaagaagtaataaaccgtcgacggtacgcaagcaatagtcacttcccccatccgcgtcgttgtcactccgcgtatgcccagcagtgcctgatccagttcgtcaagtatctcctttacctttcggtcgaaatcccggccgacggtcgtaaggctaacccggcgggtggtgcggtcgagtaagcgcactcccaaggcctcttcaagcttgtctatgcgacggctaaaggccggctgtgagacgttcagggaggtagccgccttgcggaagctattcagttcggcaacggcacgaaacgcctgcaaatcattgaggttgaagttgatggtcattgcactttcccgagcgtcatcactgatgcgcattgtgcatcaattgatcctaaaaattcaattcactaaaagaagggaaaccacgaacatgaccagacggctccagtaggccgaccaaaaaaccacatcatacggagcagacagatgcaatcatcgaagcgacttttactttgcagcattgcgatcgcggtatcacttggcagcgtcagcgcctttggtgcgttccctgacaagagaatttcgctggtagtgcccaccgcagcgggaggcgctaatgacgccatggcgcgggtagttggccaggcaatgtcgaccattctcaatcagacaatcgtggtcgacaacaaagcgggggcgaacggcgcgattgccagtgagtttgtcatgcgtgccccaccggacggctacacgttgctactcggctacgtggcgacacatgccatgaaccctgcgctgcagaagcttcggtacgatcccgttaaggattttgtgcccgttggcatggtgggttcttcggcaaccgtgatggtcgtcaatccaaacctgaaggccaacgatgccaagggagtcgtgacgctactcaaagcaacgccaggaaagatcagttacgcgtcggcgggcaatggaaccgctccgcattttgccgcggagatgttcaaactctcgaccggcaccgagatgcttcatgtgccgtataaggggtcagctccggcgattaacgacacagttgccgggcagacacaagtgatgtttccgagtcttttcaccgccatgccccagttgaagaacggcaagctgaaggcggtcgggattgcaggcagcaagcgctcttcgctgatgccagagttgcccacgctgaaggaacaagggatcgacgacgttgatgtttcccagtggtatgccatcttcgcccccgcgaacacaccagcccccgttgtagaagcattgaacaaggcattaaaccaggcgttgaaggataaagccgttgtccagcgtttggagggacaaggcgcagaggttacgaccatgtccacggcccagatgcgaacatttattcaggaggaacaggtcaagtggaagaaagtagttcaggcggcaaaactgaaggcggactgagatgagcagaacaataccttgcgtgctgatgcgagccggcacctcgcgcgggccgttctttctgcgggagtggctgcccgaaagcgtagaggctcgcgaccaggcgttgatcggtgccatcggtgcctccgacccgcttcaactggacggggtgggcggcggtagcacgctgaacagcaaggtggcgattgtttcgcgatccacgcaacccggctgtgaccttgactacctgttcgtacaggtaggagtgggtaactcctcggtggacacccggcccaactgcggcaatatgctttccggagtcgcaccctttgcgatcgagcaaggcctggttgcagcccaactcggctcaacccgcgtgcgcgttcacaacgtcaatacaggctcgcgaatcgatgtgacggtccgcacgcctaatgggcgggtcacctatgacggcgacactcgaatcgatggcgttgcgggcactgggtcaccaatcttgctcgatttcgtcgatgcgtggggcgcagtgaccggaaaggtctttccgacgggcaaccgcgttgacctgattgacggcatcgaagtgacttgtatcgatgcggcgatgccattgatgctcgtccgggcacgcgacctcggtgtcagtggacgcgaggcgccggccacgctcgacaatgatccgatactgcttgcgcgtctggaagcgctgcgcttgcaggctgggcagttgatggggctgggcgacgtctcggacagcgttattccaaagccagtcctggtcagccccggcgattcgccggaaagcattacgtcgcgctactttacgccccgcaaatgtcatgcgtcgcatgcagtcaccggcgccatcggcgttgccagcgcattcgccttacctgggacggttgctagccaattgacccgattgcccggccgccacgcacttgtcgtcttgcacccagcgggacggatcgaagtggaggtggaattggagggggagggcgatgcggctactgtaacaagagcggctctcgttcgaacggcacgcaagatcatagaaggtcagctccatctgcccgaatatgtcttctcgcggccggaaggcagccgagtaaagcaggcctcggctcggcattcattgcggatcatcgtaccaacccgtgccggaggcggcaacgatcttgtggcacatcttattggtcccaggcttgggcgactgctggggcatgacgtcatcatcgataaccgtcccggtgccaacggcggcatcgcctgcgagtacgtggcgcgggcagtacccgatggtcagacgctcttgctcggctatattggaactcattcaatgaatccggccctgcaacctgttgggtatgatccggtttcgtctttttctccggtcgggcttataggatcgtcaccgatattgttggtggcgaatccaatgcagacgccgcttgacctgggtacgctggtcgcccacatgaagcgcgagcctggaaggtttcgctacgcgtccgcaggggacggtacaccgccgcactttgccgcagagcttttccaactggccactggcacttcgatgcgcagtactaccttcgagggcgcagcgcctgccatcgcgtcgaccattgatggacggacacaggttatgttcgcgagcctgctgacagcgtatcggccggtgggtgccggtcagttgcgagcactggcagtcgccggacccaaacgtctgccagtgctgccagaagtaccgacgcttgcggagttgggcgtgaggggcatggaattgactcagtggtatggtctgtttgccccggcgggaactgctgccacgatggtggagcagctcaatggcgccttggctgcagtcctacgggatccagaggtcaaagagggcttcgagagctacggcgcagcccccgagccgggcggttccgaacttctcgcaagacgggtggagactgaactagagcgctggcagcgcattgttagggtgtcaggtcttgcgccgtcgtcgatcgacggtgacccggtgcaacagtttctggagccctgctaaattacttcgtaagaggtagcggtcggtaaccgatgtggtgcctgcaaccggcgcacgctcgattgttggggttcgcctgcctgcgaaaacggagatactttgggacaacagaaccggttatggacggccgccatgctcgaccatcgctgtgatgagccggccaaggactgcctacagtcttgcaactgcatatcagccgggttccgtgtcggctcgaaggaagtcggcaatgatttcggcagacctgcaagagttgatgaagggatttccggccaggctccccgcattacgtggggggccttgcactgactcgatcgtcgcaatatgggcaatgccgccgcgcgcgtaccgccccctgagaaggcgaggatgaccaggttttcgttgtccgccgaatactgggggcgcgtgaagaagcgatagccggcaccctggtccgcgtgcgcgctcgtcggattgactggccgggaggcgcaggcggcaagcagaagcagcatcgaaatgacggccaaggctgaggtcggcgatctggcaataggtcccccgcggcgactgcaggacgaaccggaccgggcgggtcggcgtgctgcaactcccccaatactagtcggccaatgtagcgattggcatacgttttgaggttgtcccggcgcggccactcgtctagactggatttcacctgcccaagagaccggtacttaacctggcttggcgaatgcgcggcggtgaggccgccgatccggtacctttgcggtgatctgcagggagacaagcgatgttgcccacgcccacttcagagagagcgctgtcccgcggactactcgatgtgctgatccgtgccgggctgatcgcggtgctggcaatcttctgcttccggatattccgccccttcctcgatctcattgtctggtccgtgatcctggcggtgaccatctacccgctccaggtcaggctcaggcgcaggctgggcaacaaggacggccgcgccgccacgctgatcgtgctggccgccatcgccatcattgcgctgccagcctacctgctgggcgccgccatgatcgactcgatggagaatgcgatcgccatcgtcaagagcgaaggcattcatattccgccaccgcatgagtcggtcgccagctggccgctggttggccagcgcctgtatgacctctggctgcaagccgcctcggacctggccagcgtggtgcagacgctggcgcctcagatcaaggaaatcagcctggccgtgctggccgcagccgccggcatcggcaaggggctgctgatcttcgtcttcgcgctgattatcgggggcatcttcatggcctacggcgaggccggcaaccgcagcaccgtgcagattgcctcgcgcattttcggcctggagcggggccagcgcatcgccacgctatgcaccgcgaccatccgtgctgtggcgcagggcgtggtcggcatcgccttcatccagatgctgctgatcggcataggttttgtgatcaagggggttcctgccgcgggcgtgctggccatggccgtgctgctgctgggcatcgcgcagttgccggcaacgctgatcacggtgccggtgatcatctatgtctttgccacggaaggtgccagcgttgccactatcgtcttcgccatctatgtcttcgtggcgggactggccgacaacgtgctcaagccactgctgctcgggcgcggcgtcgatgtgccgatgccggtggtattgatcggtgccctgggcggcatggtgacaggcggcgtgatcggcctgtttatcggtccggtggtgcttgcggtcgggtatcagctgttctggcaatgggtggaagacccgccgccgcaagcggatcccggcaaccagcaacagacctgaagtggtccggggtcacgcatgtcgcgctggaatcatccgctgcgcgcattgctggcctgcgcctgttgccttggcggctgcgcgcgcctggggccggatttccagccgcagcatgcgccctggacgcagcagtggcacagcccggcgcttgagcaggcgaccgagcagcgggcccagcccgacatccgcgagtggtggcaggtctttgccgacccgacgctcgaacgcctggtcgccgaagccgacgcgcacaatgccagcctgcggattgccggcctgcgcgtgatggaagcgcgcgcccaactgggcattgcccagagcgggcgcttcccgcaactgcagcaggccagtgccgatgccctgtacacggaccgccggcaggccggcggcctgaacccgcagaacagccgcttctggcaatacagcgcgggcttcgacatcggctgggaactcgatttctggggccgcttcagccgcgccatcgaatctgccgatgctgtctattttgccgcccgagccaaccgcgacgatgtgctggtgctgctgcgcgcccaggtggctgagacctactttgcgctgcgcacggccgaggcacggctgcgcatcgcccgcgacaacgcagcgctgcaaaagcgcagccttgagatcaccgagcggctgttcaagagtggcgagaccgacgagctcgacctgcagcaagcgaagacgcagtacctgggcaccctgagcagcattcctgaatttgaaagccagatcatgcgcacccgcaatgccctggcggtgctgatgggccgcccgccaggcccgttgccggagctgccggaactggtgggcaaggaaggggtgattccactgatcgatcgcgcggtactgcaggatgtgcctgccagcctgttgttgcgccgtccggatattcgcgccgccgagctgcagattgccgcgcaatcggcgctgatcggcgtggccgaagccgatctctatccgtcgctgacgttgctgggcagcattgtctggtccgccagcacgctggccggcacgcccaacagcctggccctgatcggtggccccagcctgcgctggagcgtgttcgactacggccgcatcaagaacaccgtgcgcgtgcaggacgcccgcctgcagcagctgatcgtcgcctaccaggatgccgtgcggcaggcggcgcgcgaggccgacgatgccgccagtgccctgatcaaggcgctggatcgcgagcagatcctgcgcgacagcgcgctggccgccaggcgttcgctgacgctggccaacgcgctctaccgcgaaggctactcggacttccagcgcgtgctggatgctcagcgtgcgctggccacccagcaggacgcctacctggtcaaccgcagcaatgccgtcagcaacctgatcgccttgtacaaggccctcggcggcagctggcacagcgagcagccactggtggacccggccacccgtcagcagatgcagcaacgcaccgactgggggaacctgctggatgaaccgggcccgccgtccgccggtgccagcctcccagtgaagcagaggtagatctccctgagcgagtgccgatgagcgatgccccgcaacccaccgcagccccagcgcccagcgcaccgccgcccgccgccgacccggcaaggaagggcgtgcgctgggtgctcttgctgatcgtcatcagcctgacctggtacctgtttgccgaccggttgaccccgtacacgcagcaggcgcgggtacaggctttcgtggtgccggttgcggcggaagtgtccgggcgtgtgaccaaggtgcatgtgcgcaacaaccaggacgtcgcggcaggcactgtcctgttcgaggtggatccccagcactacaagattgccgtggaccgcgcccgcgccgatctggagtcgacacgccggcagatcggcgccagcaccgcgggcatcgaatcggcgcaggcatcgctgcgcgcagcacgcgccaacgagctcaaggcgcgccaggacagggaccgcctggagcgcctgtacagcgatgatcccggcaccatttccctgcgccgtctggaggtggcgcgcgccagcctcgagcaggctgtcagccaggtcgccgccgccaaggccgaggtccagcgtgcgcgcgaacagcaggggggcagcgaggaagagaacgccaagctgcgcagcgccgccactgccctggaaaaggccgaactggatctcgccaatacgcaggtgcgggcgcgcgccgccgggctggtcaccgacctgcgcaccgatgccggccagtttgccgcggccggcaatccggtcatgacgctgatcgcgatccacgatctgtggatcagcgcggagatgaccgagaacaacctgggccgtgtcgagcccggcacgccggttgccatcgtgctggatgcgctgccgggcaggatctttgagggccgggtgcgcagtgtcggctatggcgtcaacgtcggcccgagcacgccgccgggcagcttgccgacggtgcagaacagccgagactggctgcgtccggcgcaacgcttcccggtggtggtcgagattgcccagggcgaactcgcctcgatgcgcggcattcgcgtgggcgggcaggccgaggtcatggcgtttcccacccagggcaacccgctcaatccgctcggccgtgtattcctgtacctgatgagctggctttcctatgtctactgacagcccggtgctgccgatgcccgcgcgcgatccacgcgcccagcgttcgctgcgcgtggcgagcggcaccgcgctgtgcctggcggccagcttcggcctgggcctgccgatccccatgctcgcgccggtgctcggcgtgttcctgctggccagcgtcaaccagccggtgtcgcccaaggccgggctgggcctggtgctggtcgtgatgctgaccaccggcactggcctgctgctgatccccatgctgcgctactaccccgtcagcggcgtgctgatgatcggcctgtgcctgttcctggcctttagctacggactgcgcggcggcaacaacctggtctccaccttcctggtgatcggcctgaccatgatctcggcggcgggcaccttcgatttcgggctggcggtcatggtcatcggtgccctggtcaaggggctgctcgtcgcggtcgtggtgctggcactttgccactggctctttcccgaaccggccggcgcgcaggcgcggcctgcggccaaggccttgccggatgaccaggccgcctggattgcgctgcgtgcggcgctggtggtgatgccggccttcctgctggcgctgaacgacccggccgcgtacatcccgatcatcatgaaagcggtcagcctcggccggcaaagctgcaccaccacggcacgcggcgccgggcgcgaactgcttggctcgaccttgttcggtggcgtgctggccatcctgttctggtgcgcactcagcctgttcgtgcatttgtggatgtacttcctgtggatgctgctgtttggcctgctggcggcgcgcaagctgtatggcctcagcccgtcgcggtacccgccaggcttctgggtgaacactctggtgacgctgatcatcctgctgggccagtccgtgcaggacagcgcggccgggaaggatgtctataccgccttcgccgtgcgcatgggcctgtttgtcggcgtcacgctgtatgcctggctgatgatcgagctgctcgaccagccgcgcggcgcacgacggcatgcccgctgaagaggccggtcatgctgagcaacctgctgatcggccttcccgtaatgctgctctgcctgctgctgcaggcggtcttcgtggctatctgcctgcgctactacgtgcgcttcaagcatgtccggcaaggccgcgaatcgctcgggcaggacatcctgctgttgtcggtcgtgatggtgctgatgttgctcggcaacttcgtgcagatggcgatctgggccgtcttgttcatgctgttgggcgagttcggcgatttcgccaccgcgctctatcactcgggcgtgaacttcgccacgctgggctacggcgatatcgtcatgtccgaagcccggcgcttgctggggccgctcgaggcggccaacggcatcctgatgttcggcgtctccaccgcagtgatgaccgcggcggtgctggacgtgatcaagcgcaacccggccaagctgcggcaggacgaggggccatagggatgggggcgtcgggcgcagcccgggccgggactgggacggttctaatatcggatgccgaatcgcgggcggggtcgggcaatcgatgcatcccgatctctgcgaaagctggcccgccgcgggcgactcttcggccggctgcactcgccattcaacgatccagggaaactctgatgattgcacggcgagcaagcatagcgggcgccacaaagcagcgcggcggtggggccaggcacaggcctggccccaccgccgcgctgcgttttcccggtcaggaaatcgtgtaggtggtacgttccccggggttgtagaggtccctggccagttgcaggatctggtcccgatgatggtcgaaggtggcgagaagggcggattcttccgcggcaccctggtggctcaggcgcagaaggatttcgtcagtgacctgaaaggccacttcgcgcgcgttgtcgtagccccagaagcaaacgcagtgccgcgccgcatcgtagctgcggctgggattgggaaaattcagtgccattgcagactcctgtccggtcacggtacgccgtgcgtgttgggcttgctggcgccagccggtgctgccgcccccagtatgcgcctgtttcccgcaagctgggcatgtgtccctgcggcctgctggagcgcatggcgcgttcttcgcgaaagatatttccttcgccggcgatttagcgcgtatgctgggattgccattatctccaggcaagccattcaggagcccatcatggccaagagtcaactacgcagcagccgcgaagccaagaaacccaagcaaccgaaaaagccatccgtgccggcctcacccttcagcacggtccagtttcgcgggcacgatgaggtcgccaagaagaagaaatgactgagaccgacagtgcaggggtcgtctggtcccttgtgttcctggccgcgttggtcggggtctacggctacatcatccgggtgggcatccaccacaagccggtgttcggcatagcgaagcactcgcttcggtactggtggcaccggctggtccacgtgaccaagtaagcaacgccggccagtcaggccggcgcgggcaagatttgcggttttgccgcacaatacagcctgcgcgccgcacaggagcacgctggatcgatcagaggcgagggcactgacctcgcccgtcagcgggcggcattttgttgaacatcctgcaatcctgtacatggccgccccacatgcacattccgccgcggatcccgtccgcggcgcagacacttccgtttctttccgcgatagcaatccatccggccgcctgccgctgctggcgctcggggtcggcagcttcggcatcggcaccggcgaattcgtcatcatgggcctgctgcccgatgccgccagcgacctcgccatctccatcccgcaagccggccacctgatcagcgcctatgcgctgggcgtggtcatcggcgcgccgctgctggcggtgctgggcgcgcgctggccgcggcgcaacctgctgatcgcgctgatggcggtgtttgccgccggcaatatcgccagcgcgctggcgccttcctatctgtcgatgatggtggcgcgcctgctcacgggttttccgcatggcacgtactttggcgtggcggcgctggtggccgccagcctggtcccgcgcgaacggcgcgcgcaggcggtggggctggtgatgctgggcctgaccactgccacgctggtgggcgtgccgatcgccgccacggtcggcacctggctgggctggcgctcggccttcgtgattgtcggtgccctcggtgcactgacggcgctgctggtgtggcggtgggtcccgttcgtgccggccgaccggcgtgccagcccgctgcgcgagctgtcggcgctcaagcgcaagcaggtctggctgacgctcggtatcggtgcgatcggcttcggcggcatgttctcggtgttcagctatatcaagccgaccatgctcgagctggcgcatatgccggcggcgggtatcccggtggtgctggccttgttcggcatcggcacggtggcgggcaaccttgccggcgcgaagctggccgacaaggcattgatgccgaccatcggcggcgtgctggtgtgggcggcgctggtgctgggcgccttcgccttgaccgcgtcgcatccctggctggctgccatcaatgtgctgctggtgggcaccacggtggcactgggcccggccttgcagatccggctgatggatgtctccggcgacgcgcagacgctggccgcggccctcaaccactcggccttcaacatggccaacgcgctcggcgcgtggctgggcggggtgaccattgccgccggctacggctgggagtccaccggctgggtcggcctgctgctggcgctgggcggcctggtggtctatgcgtggtcgatgctgagcatgggccggcagggcgcgccagtcgcggcgcaggcgtgatgcaggcggacctggtgggtgcgcgcgcaggtctgcaaggaacaaaaaaggggtgcctcatcgggcacccctttttcatccgcggtccgctggcgggacgggcttactctgcgtccgcgacgctggcgccgaccacgttgaagccgccgtcgacataggtgatctcaccggtcacgccgctggccaggtcggacagcaggaaggcggccacgttgccgacttcttcgatggtgacgttgcggcgcagcggcgcggcctgctcgaagtggccgagcagcttgccgaagcccttgatgcccgaggcggccagggtcttgatcgggccggcggagatgccgttggcgcggatgccacgcggaccgaccgacgaggccaggtagcgcacgctggcttccagcgaggccttggccaggcccatggtgttgtagttgggaaccacgcgctctgcgcccaggtaggtcagcgtcagcagcgaggccttgtccgatagcagcggcagcgcggccttggccagcgccgggaagctgtaggcggagatgtcatgggcgatgcggaaaccttcgcgcgacaggccttccaggaagtcgccggcgatcgcctcgcgcggcgcgaagccgatcgagtgcaccaggccgtcgaacttatcccagcgctggcccagcgcggcgaaggtcgcggcgatctgctcgtcgctgccgacgtcgcattcgaacaccaggtcgctgccgaattccttggcaaagtcgctgatccggtccttgaaccgttcgccgacataggtgaaggccagttcggcgccttcgcgtttgcacgccgacgcgatgccataggcgatcgaccggttagagagcaagccggtgatcaggatccgcttacctgccagaaatcccataagttctccaaggtggtgtatcaggcacgcttcgtgcgtccgccgtgcggccgtgcgcgtgctttgctgtcttgcggccgtttttattgcgccgcgcagagggaatgtccggatggctggcgccacccccgacgcatgtaaaattgtctcatacttggcccggccgcagaatgccgggccccacaggtcatagtggaggaatccaacgggatgcctattcaagcacgttggccgcttcaggcggcatggcagtgcttccggcgggatgcggtactgcgcggttgggtcgcaagcgggctggcgatggcgctggcggcgggggtctctctcttttcaaatccggcgctggcggcgcatggcttcgcgctgcacggggacctgaagtaccaggcggatttccggcatttcgactatgccaatcccaatgcacccgccggcggcacgctgacactcgccaatccggaccggcgcaccagtttcgacaagttcaatccgttcacgctgaagggcacgtcggcgcccggcctgaacgcgctgatgttcgagtcgctgctgatcagcagcgccgacgagagcgcgagcgcctatggcttgctcgccgaggatgtcacggtggcgccggacgagctgtcggtcacgttcaccatccggccccaggcgcgcttctccaatggcgacccggtgctggcgtcggatgtcaaatattcttatgacatgctgatgagcaaggcctcgagtccgggctatcgcagcatgtgtaccgatgtgaaggcggtgatcgtcgccggcgagcgcacagtgcgcttcgaattcaagcagcgcaaccgcgagctgccgctgatcgtaggctcgctgccggtgttctcgaagaaatggacggccaaggttccgttcgagaagctgaccttcgagccgccggtcaccagtggcccctacctgatcgagcgctatgacgccggccgcggcatcatcttccagcgcgacccgaagtactggggcaaggatctcgcggtgcgccgcggcaccttcaatttcgcgcgcgtggcctaccgcctgtacaaggacgagaccgccaagctcgaggcattcaaggcaggggagttcgacgccatcgtcgaatacaaggccaagaactgggccaagagctaccagggcacccgctttcgcaacggcgagctgctgaagaccgagttcccgcaccgcaacggtgcaggcatgcagggcttcgtgatgaatatgcgcaagccggtgttccaggacgtgcgcgtgcgccaggccctgatccttgcgctggacttcgaatggctgaaccggcagttgttctacggcgcctacaggcggctggacagctggttctccaacagcgagctggccgccagcgccaccttcgatggccgacccagcccgggcgagctggcgttgcttgagccgctgcgtgcggaattgccgccggaggtgttcggcccggacgtggtccagcccagcactgcggcgccgcgttcgctgcgcgacaacctgcgccaggcacggcgcctgctggcccaggccggctggacctatacggatggcgcgctgcgcaacgccaagggcgagacgctggtgttcgagttcctcgacgacggcggcgccatgagccgcgtcatcaccacctatgtgcgcaacctggagaagcttggtatccaggtgaaccagcgcaccacggactttgcgctgtaccagaagcggctggaggatttcgacttcgacatggtgtcgatccgctttcccgactcgcaaagccccggcaacgagctgcgcgaccgcttttccagcgaggcggccggcacgccgggctcggacaacctgttcgggctgaagtcgcccgtggtcgacaagctggtggataacgtcttgcacgcccatacccggcaggaactggtcaccgccgggcgggcgctggaccgggtgctgatgcatggctactacatcgtgccgaactggtacagcgcatcgcaccgcgtgtcctaccgcaagacgctggcctacccggagcgccttccctattactacacggccgaaggctggatcctgagccaatggtggcgcacggacctgcagccgcaggcacgctgacgcgcccgccgcgaacaagacaaggaagaggaccggccgatgcttgcctacctgctcaagcgcattctgctgatgatcccgacgttgatcggggtcatcacgctgaccttcgtggtgatccagttcgtgccgggtggcccggtcgagcagatgatgatggaactgaaagggcggggcggtgccggcgaagccagcggcggtggcgccgaataccgcgggcggcgcggcgtcgaccccgagaagatcaaggagatccaggccctgtatggctttgacaaaccgccgctggagcgctacttcctgatgctcaagcgctttgcccagttcgacctgggccagagctatttccagcaccgcagcgtgtgggagctggtcaagtccaagctgccggtgtcggtcagcctgggtttgtggaccttcttcctgacctacctgatatcggtgccgctgggcatttccaaggccatccgcgcgggcagccgctttgacgtggtgaccagcatcatcgtgctggtgggctatgccatccccggcttcgtgctgggcgtgctgctgctggtgctgttcggcggcggcaccttcgtgcagtggttcccgctgcgcgggctgacctccgacaactgggagcagctctcgctgatgggcaaggtgatggactacctgtggcacctggtgctgccgatcacggcatcggtggtgggcagcttcgcggtggtcaccatgctgaccaagaatgccttccttgaggaaatccgcaagcaatacgtgctgaccgcgcgcgccaagggcctgggcgagcgccgcgtgctgtggaagcacgtgttccgcaacgcgctgatcccgctggtgacgggattcccggccgcgttcatcggcgccttcttcaccggctcgctgctgatcgagacgctgttctcgctcgacgggctgggcctgctgtcttatgaggcggtgctgcggcgcgactatccggtggtgctgggcacgctctacctgttcacgctgatcgggctggtcacgcgcctgatctccgatgtctgctacgtgctggtggacccgcgcatccatttcgagggcttgcaccgatgaaactgttcacgcacgcggcccccaacgggctgccgcattcgccttcgccgcgccagcgcgcctggcagcgctttcgccgcaaccggcgcggctactggagcctggtgatcttcgtggtcatcttcgtgctgagcctgggcgccgagctgctgtccagcaaccggccgctggtggtgcactacaagggcgaatggtatttccccatcgtcaaggtctacccggaaaccaccttcgacggcgatttcgccacgcccgcggactacctcgatccgtatatccgcgaccgcatcaccaccaacggcaacttcgcggtgttcccgctgaaccattattcgtacgactcgctcaactactttgccaaggagcccaacccggcgccgccgtcggcagagaactggctgggcaccgacgaccgcggccgcgacatcctggcccggctgctgtatggcttccgcgtgtcggtgctgttcagcctggcgctgaccgtgatcggggtgctggtgggcacgctgaccggggcgctgatgggcttcttcggcgggcgcttcgacctgttctcgcagcgtgccatcgagatctggagctcgatgccggagctgtacctgctgatcatctttgcctcgatcttcgagcccagcctggcgctgctgatcatcctgctgtcgctgttcggctggatgggcctgtccgactacgtgcgcgccgagttctaccgcaaccgctcgctcgactacgtcaaggccgcgcgcgcgctgggcctgtccaacgtgcagatcatgtggcgccatatcctgcccaacagcctgaccccggtgatcaccttcctgccgttccgcatgagcgccgcgatcctggcgctgaccagcctggacttcctcggcatgggcgtgccgccgaccacgcccagcctgggcgagctgctggcgcagggcaaggccaacctggatgcgtggtggatttcgctgtcgaccttcgcggtgctggtggtcacgctgctgctgctgaccttcatgggcgacgcgctgcgcgatgccttcgatacccgcctgggcctggcggcgctgcgcggccgggtcgaacccaagatcccggccggcgcgccgaccggggcggcaccggaggccacgccatgaccgcggtgtctcccgtgatccagccggccgtggcgccggccgcgacgccggcgcccggttccacgctgatgtgcgtcgacaaactttccgtcaccttcggccacggcgagcatgccacccgtgccgtgcgtgaagtcagcttcgacctgcgcgcgggcgagcgctacgcgctggtgggcgagtcgggctcgggcaagaccgtgaccgcgctggcgatgctgcggctggtggaagacgcctactacgacggcgcgatccgcttcgagggcaagaacctgctggaggtgtcggaccgcgagatgcgcggcatccgcggcgccgagatcgcgatgattttccaggagccgatgacggcgctcaacccgctgtacaccatcggcaaccagatcgtcgagacgctggcgctgcacgagggcctggaccgccgcgccgcgcgcgagcgcgccatcgcgctgctggagcgcaccggcattagcgacgccgcgcaccgcttcgacagcttcccgcaccagctctcgggcggccagcgccagcgcgccatgatcgccatggcgctggcctgccgccccaagctgctgctcgccgacgagccgaccacggcgctggacgtgaccatccgcgcccagatcatggacctgctgcgtgacctgcaggccgagttcggcatggcggtgatgctgatcacccatgacctcaacctggtgcgttcctttgcccagcgcgtgggcgtgatggagaagggcgtgctggtcgagaccggcgagaccgcgcaggtgtttgccgccccccagcacccctacacccgcaagctgatcgacagccgccccaggcgcgaggtgctgccgctggtgccgctggcgccggtgctgctggaagcgcgcaagctgagcgtcaactacgcgcgcaagcgccgcgggctggccggctggttcggcaaggaccagtttgcggcggtcaaggacgtggacttccagctgcgcgagggcgagaccgtcggcatcgtcggcgagtccggttcgggcaagaccacgctggcgcataccgtgctggcgctgcagcgcaagagcggcggcaccatccatttcctcggccgcagcttcgacaccgccacgcgcgacgatcgccgccagttgcgcgcgcgcatgcaggtggtgttccaggacccgttcggctcgctggcgccgcgcatgaccatcgagcagatcgtcggcgaaggcctggcgctgcaccagcccgggctgtcgcacgagggcacgcgccagcgcgtgatcgaagccctgcgcgaggtcggcctggaccgcaccgcgctgggccgctatccgcatgaattctcgggcgggcagcggcagcgcatcgccattgcccgggtgctgatcctcaagccgcagatcctggtgctggacgagcccacctcggcgctggacgtgtcgatccagcagcaggtgctggcgctgctgtcccagctgcagcacaagtacaacctcacctacctgttcatcagccatgacctggcggtgatccgggccatggcgcatcgggttttcgtgatgaaggcaggggaggtggtcgaggccggcgacaccgaagcggtgctgggcgcaccccagcacccctatacgcgcaagctgatggcggcggcgcaggtcggcgctggctgacccggaggtgtgcggcgcagcaacgccgcggccccgcctggctagcatccggttgttcggatcaatccgataaacaaggtgcgaattcccgcctatatccttgattcgccagtcaaatccggcgaatttgtaacgaactttgacatgtgaatgacaaccctttaccatcccgcgagaactagttttgggggtggtccgtccgacgcattggatcgtgcatagcacgtttgcggtgcaagacaggcccggaaagcctggtgcggatgttgcatagggttcaccccgcaggttcacatgaatttctcgcgaagttcacgcgaatttcacatataaccagctgccccggacttgtgccggggcttgctttggaacgatcaacgggagaaccaatgcagcgatcggtacttcattccctggcgcgtgccgccgtcggaattgccattgtctgcggtgcgactgtgtcgaatggagtgctggcggatacggtattcaaggatgccgacgcccgtatcgatgccacggcccacgccgcggattcgcatgcggaaggcaagcgcggcttgctgtcgtcggtggtgaattccaccagcaacgttgccagcaaggctggcgacctggtcatgaatgcgctgggcctgattggcgtgcgttaccgcttcggcggcaacagccccgaatccggcctggactgcagcggcttcgtccgctacgtgttccaggacaccttcggcttcatgctgccgcgccgctctgtcgaaatcagccgtgtcggcaccaccgtggcggccaccgacctgcgtccgggcgacctggtgttcttcaacaccatgcgccagaccttctcgcacgtcggcatctatatcggcgacaacaagttcgtgcatgccccgtccacgggcagcaagatccgagtcgacgacatgcgtgcgtcttactgggtgacccgctacaacggcgcccgccgcatcgaggatggcaaggagggcggcgccgatggcctcggcgacatggtcgagacgctcaagcgctatgaccccaaggttgtccgcgcatcgatgtacggcggctgagtttccggcgcgctacaagcaaaaaggactgctgcgacagtccttttttctttggcggggcgtgctccccgggctattgcactgcgaccgttccggccggtgccaggcgggcctgttccagccgctgccgcagcgttgccatcaccgccgtggtggcctgttcgccggccagtatggctcggttgcgggcgttgaagtcgctgccgcccatatcgggcagctcggggcggatcaccacgtcggcgcgcgccagtgccatcttgttgatcgactggcccatgatcgcggtggtctgcagcagcacgccgctctggcccgcgttcttctgcgccgacgggtcggccgagatgttgaccgcgatgacaaagtccgcgcccatgccgcgcgcggaatccaccggcaccggctcgaccaggccgccgtcgacatagtcgtgaccctggatcgacaccggctggaacaccccgggcacgctgctcgacgcgcgcacggcctggcctgtgttgccgcggcggaacaggattttctcgccgctcttgagatcggtggcgacaatgcccagcggcagcttcatggcctcgatggtccggttctgcaccagccggttgatgtagttctgcagcgcctcgcccttgagccagccgccgaagcgggtgccgaagggcagggcccagtcggcgatggcagcctcgtccatggtcagcgccagcttgttcagctggaagccattcagtccgctggcgtaaagcgccgccacgaccgcgccggcgctggtgccggtgaccaggtcggcatggatgccttgcgcttcgagcgccttgatcacgccgatatgggcaaagccgcgcgccgcgccgccgcccagcgccaggccgatcttgacgggccgcggcgcgggcggggtggtggcgagcggcggcgcgggacgcgggccgaacgagcagcccgccagcagggcggccgcggagataccgaggaaatgacgtcgttgcatgaagcgagatcagtagccaggtgggaccggcggatacagggatgtgatgcgggcgctcctcaatggggctggcatcgaattgcctggatcagcggcatcacctcagaccggcgcaagcataaatgattccgcacggcgctggcacgccgggcggggcgagggatgcgcgttggtataatgtaagacctgcacatacaccagcctgcgcgccgctgcgcgcgggctttcttgtttctgcccctgaccatgacccaacgcgtccgcacccgctttgcgccgagcccgaccggttttatccacctcggcaatatccgctccgcgctctatccctgggccttcgcccgccgcatgaagggcgactttatcctgcgcatcgaagacaccgacgtcgagcgttcgtcgcaggaagcggtcgacgtgattctcgagagcatggcctggctggagatggatatcgacgaaggtccgttctaccagatgcagcgcatggaccgctatcgtgaagtggtcgcgcagatggttgagtccggcctggcctaccgctgctacatgagcaccgaagagctggatgccctgcgcgaagcccagcgcgagcgcggcgagaagccgcgctacaacggcttctggcgtcccgagccgggcaaggtcctgcccgagccgccggcaggggtcgatccggtgatccgcttcaagaatccgatcggcggcagcgtggtgtgggatgacgcggtcaagggccgcatcgagatctccaacgacgaactcgacgacctggtgatcgcgcgcccggacggcacccccacgtacaacttctgcgtggtggtggacgacctcgatatgaagatcacccacgtgattcgcggcgacgaccacgtcaacaacaccccgcgtcagatcaacatcatccgcgcgctgggcggcacgccgccggtctacgcccacctgccgaccgtgctcaacgagcagggcgagaagatgagcaagcgccatggcgccatggccgtgaccggctaccgcgacgagggctatctgcccgaagccgtgctgaactacctggcgcgcctgggctgggcccacggcgacgccgagatcttctcgcgcgagcagttcgttgaatggttcgacctggagcacctgggcaagtcgcccgcccagtacaaccccgagaagctggcctggctgaacaaccactacatcaaggtcggcgacaaccagcgcctggccacgctgacgcagccgtttatcgaggcgctcggcggcaaggtggaaggggcggacctggccggcgtggtggcgctggtgaaggaccgcgccaatacgctgaaggaggtcgcgcaggcggcgctgctgttctatcgcggcgagccgcaggcggatgccgcgctcaaggccgagcacctgaccccggaaatccagcccgcgctggcggcgctggccaaccagctggccgcgctgccggaatggaagcgcgaagccatcagcgccaccttcaaggccgtgctggccgagttcggcctgaagatgcccaagctggccatgccggtgcgcctgctggtggccggccagctgcagacgccaggcatcgatgcggtgctggaactgttcggccgcgacacggtgctgcgccgcctggcggcagctgcataaaaagtcgcaaaaagtccgcgccgggggcttgcgctccgggccggacttgcgcataatctctttctccctgcggcgcggtccctgaccaagcgggctggcggatccgcaaggatcttcgcaatctccgaactgatttttgaagtgacgggaaagcgaaaaaagctgaaacgggagcttgcaaagattaatagttgatatataatcttggcttcgcttgaaacggtagttaattcaggcgaaaacgcagcaagttgcagtaaagagcagtaccatggggctatagctcagctgggagagcgcttgcatggcatgcaagaggtcagcggttcgatcccgcttagctccaccaagatttaggtgtcatccaggttgtttagggtggcgccagacggaacgtgttgaaagacaagtttctgtccccttcgtctagaggcctaggacatcaccctttcacggtgagtacaggggttcgaatcccctaggggacgccataacaacagggcgtaatcagacgcccagtcgactgaagcgaagcttcggaagacgccgactaaggagtggtagttcagtcggttagaataccggcctgtcacgccgggggtcgcgggttcgagtcccgtccactccgccaaaactgaacccgcatggtttgcgccatgcgggtttttctttgggtgaggcattatgtcgttaatcgccgcaaacgcaataaaaaatgttgcattcgttgcgaaattcgctatataatcctgtcttcgctgcaaatgctgcggtaagcggcagacagcgaaggtggttccagcagtaaccgtccagcagtatcggatacggggctatagctcagctgggagagcgcttgcatggcatgcaagaggtcagcggttcgatcccgcttagctccaccagaatttgggatgcgtctgaaaagaagcttcccaggcgcgaaaaagcctgctatgatggcggactttccagcgcaagacagaaagcgcgttgtaaaacaagtttctgtccccttcgtctagaggcctaggacatcaccctttcacggtgagtacaggggttcgaatcccctaggggacgccataacaacagggcgtaatcagacgcccagtcgactgaagcgaagcttcggaagacgccgactaaggagtggtagttcagtcggttagaataccggcctgtcacgccgggggtcgcgggttcgagtcccgtccactccgccaaattagaacgcccgcgtaagcgggcgtttttcttttccggagtggaggaagccgcctgcgcggcttccggcggggctcgaagggctgcgcttgcaagcgcagccgcggcccgcggcatgtgggcgagtcccgtccactccgccaaattagaacgcccgcgcaagcgggcgtttttcttttccggttactgaaaatgcggccgccgcccttgcgagcggccagtgccagagtcagttttccggatccttgctgacccggctgaaataccgcaccagcagcacgcctgcaatcgccaggctgatgctgttggccagccagaagccgctggcgccgcgtgtgaagtcgggcatgccctcgatcagcccgaagcccagcacataacccccgcccagtccgatgccccacagcgagccggcatagatcagcgtcggaatcagcgcgatcttgtacgcgcgcaggataaacgccgtcatcacctgcaccgcgtcgaaggcctggtagaacgccacgaacagcaccagcggcagcgctgccgcgaccaccgcgggatcgctcgcgtaggcatgcagcaccggcttgcgcagcagccacagcagggcaccggtcagcaccgccagcgtcaccgccatgcggatacctcgccaggcaaggcggctggcgccggccaggtcgcgcgcgccgagatgctgtgccaccagcgtcgaggtggcaatccccagcgacagcggcagcatgtaggccaccgcgcccaggttggcgatgatctggtgcccggccagcgtgaccgtgcccaggcgcgtgatgaagatcgacatcagcgtgaacgaggtgatctcgatcaggtaggtcaggcccatcggcacgcccagccgcagcagcgcgcgcagcggggcggcagccggccagctccacatactgaagatccgcagcgggtgataggcgctgccgtagcgcaggatcagcagcccggcgatgcaccaggcccagctgatcagcgtcgaggccaggccgcagccggggccgcccatcgccggcacgcccaggccgccgtggatgaaccaggcattgagcggcaccttcagcgccagcccgccgatctgcagcaccgtcaccatgaccgggcgcgacagcgcattgttcagcgccgagtagatgcggaatgccagcgccgccggcagcccgaaggcaccgaaatgcaggtaggcggtggctttctcgaccagttcgggcggcgccttggcgaaagcgagcagcggggccgggaaggccagcagcagcacgcccggaatcgccagtgcggcgcccagccatgcggcctgccggacctcggcgccgatcgcctcgatgcggccggcgccatagagctgcccggcgatgggcgacagcgcctgcaatacgcccatcaggctgatatagatggtgacgtagatcgagccgcccaggcccacggcggccaggtcggtcgccgaggcgcgcccggccatcacggtatcgatgacgccaaaggcgataacggcaagctggccggccagcaccgggccggccaggctggcgatacggcgaaggtcttggagcagggtcattcagggctcggcaggcttggtcagggctggatggtcagccccgcagccgcctgcggccggaatggttcgatggcgcgacaggcgctgcggtggtggtgacgccggaaagggctcagggctggcgcggcaggcggcgccgcggcaggtcggggcgcggatggacggcgcgcgcggtatcgaccagccggtacatgcggaagcgctcgtcgcggtccgcggggcggcggccttcccagatcagccgccactcgaaatgcgagatattgcccggctcgccatagtcgaccgcgtcatggcgcagcagcacgtcgcagccgtcgttggggccgccaaagcggatatggccgaaataggcgaacgacgccagctgcgcatcgcccatgcggatcggctggacgcactggtaggcaggcggcagcgccatcgccgcggcctgggccacgtcgcggtaggtcttgccgtagttgatcgagggcagccacagcgtcattgccatgacccacatcagggtggtgccggcggcggaaatcaccaccgggcgccagatctgcttgggcgcgcgcgacagccgccagcgcacgatcagcacccacgcgaccgtggccgccagcgcgaacaccaccgcggcaatggtgaactcatgctggtagccgggcagctggcggaagacgttgcgtgcgatgcgcggcggccagccggtggtcttggcgatccacatgaaccagaccgtgccaccgaagatggtgaagaacagcagcgcgaaccagtcgatcgcgttgatcacgccgcgcgccagcgtgggcagcgcgaatgcggccagcacggccatcggcggcagcagcaggatgaactgcacgtcgccggcactgcgctgcaggaacagcagcaccagcaccggcagcagcagcgccagcggcgccgccacatggggggcgcggcgcatgccggtccacgcgatccaggcccagcccgcgatcggccagaccggccacgtgtacaggaacaggttgcgcacgttgaagccgaaggtcgccacattgggcgagccgtagctgcggcggtcatagcgcgaccattcgcggatgaaggtcaccgcctcgtcgcggtcggccgcgccgaagtaggcggccgccagccacgccgacaccatcagcagcgccagcggaatgccgatggcggccaggcgccgccacggcagcggcttgcacaccagtgcgcagaccgcgctgccacccagcagcgccagcggcagcaggggcccgctggccagcgccagtccgcccagcgcggcaccatagaccaggctgccctggatgggcttgtcgaggctgcgcaccatgccgtacagggccagtgcgataaaggcgacctggccgacctgcggcgtggtctcgtgcccgcgcatggccaggcccacgcaggccaggaagatcagcagcgcgccgtcggccagcgtgcggccgtaatcgcgcgcgttgggctggccgccgaaggcataggcaaatggctggacctcgtcgcgccggcccagcaggtaggtggtgtaccagatgcaggcgcaggtcgcgaagaagaacagcgccgtggccagccgcgcggcgtcggccgcgcccagccagctgccgaagccgcggatcatcagcgcgccgatccagaacaccagcgggccgtcctcgctgtacgggcggccgacgatattcggcatcagccagtcgtgcaggttgccggtggccagctgccacatcacgccaaagccggcggcgtcctcgttcttccacgggtcgcggccgaacaggccgaccaggccatagatgatgcagatcgccagcagcagcgcgcgcggcagggcgccggtcgcggcagcggtcaactggacgggggaggtattggcttgacgcatcgatgctcaggtcgggccgtggcgcaatggcgcgaaggccacagtatcgcgcatgcggcggccgcgcgggccgtggcatggcgtggaagcctcacggggtgtggggtaaatccaatgaatgcggcggtaccggtcgtggtccggcacaaaagcaaagaggcagccgatgctgcctctttgctgtttcgcacaggccccggagcatctgtccgcgggccttgcgaagcggggttcgctgaaagcgatttacttcgcagccttgcccagcttgttgccgaacttctggcggaacttttccacgcggccggccgtgtccatgatcttctgggtgccggtgtagaacgggtgcgattccgacgagacttcgatcttggccagcgggtattccttgccgtccttcacgatcttgtccttggtctggatggtcgagcgggtgatgaagctgaagtcgctggacatgtcctggaacacgacttcgcggtaattcgggtgaatgccttctttcatgatgagtcctttctggttgggtagccagtccgttgcaatccgctgttctccgccgagggcgagagcgtgcatggcgcggcgacgaacgaaccacttgccggtaacgggcaaaccgggattatggcagaaaaacaaatacttggggaagaggctgcgccacgagcggcacagaaagtgttgtgcatgaatatggcaaaagcatcacatggaggccgggtcctggcgatagaaggcggccagcgactggtatacaaccggccagtgccgcgccagcccggtcggctcgacaaaaaatgcctctgacgtcacggcaaagaactcgctcggcgcctcggtcccatatgggtcgatgatgcgcagcgccggcggcagccgctccgggtgctcccagtcggcctcgtcgcgtgcctcccaggactcggcaaagcggtcgtactcggtcaggaaggtctcggcccaggcttccgcgtctatgtccgggtgcagcacgcgcgagaagggcggcacgccgtcgggctcgccgtcgagcatgtccagcttgtgggcgaactcgtggatgaccacgttgtaggtatcggccggcagttcgtggtcgctgtcgatgccggccccgggggtgtgcacgtcgggccaggacaggatcaccggcccgtgctcccaggcctcgccgctggcttcctcgaccacgccgtgcactaggccgatctcgtcctgcacggtccggcggatgatgaactcgcccgggtagagcacgatgccgtgccagccccggtaccaaggcagccccagcttcaggatcggcacgcaggcctgcacggcaacgctggccaccatgtcgtcggccagcggcaggtcgtgcgcggtggagtattccttgtcggcgatgaacagcgtggccagttcgcgcagcgccgccaggtcttcgctgccgtagcgctgcacgaacggcagcgtggcgaccgtgcgcgcccacagcgcatcggggatggcgtagtgctccagcttgcgggcccgcgagcgggtgcgcaggaatgaggtcagtttgccgagcatgggcgtagcgcggtgcgctgtgaaatggtccggcaacaaaaaaggtcgggcaacaaaaaaggcgtgccgtggcacgccttcctgtccgccttgcggcgatgctgcgttgacgctgcagcaagggctcagccgcctctgcgcatcatatcgaaaaactcggcgttgttcttcgtggccttcatcttgtccatgatgaattccatcgcctgcacttcatccatgtcggagatgaacttgcgcaggatccagatcttctgcaggatttccggcttgatcagcaactcttcgcggcgcgtgcccgacttgttcaggttgatcgacgggtagacgcgcttctcggccaggcggcgttccaggtgcacttccatattgccggtgcccttgaactcttcatagatcacgtcgtccatgcggctgccggtttcgatcagcgcggtggcgatgatggtcagcgaaccgccttcttccaggttgcgcgcggcaccgaagaagcgcttcgggcgctgcagcgcgttggcgtccacaccaccggtcagcactttgcccgaggccggcaccacggtgttgtaggcacgcgccagacgggtgatcgagtccagcaggatcacgacgtcgcgcttcagttcgaccaggcgcttggccttctcgatcaccatttcggcaacctgaacgtggcggatggccggttcgtcgaaggtcgacgcaaccacttcgccgcgcaccgaacgcatcatctcggtcacttcttccgggcgctcgtcgatcagcagcacgaacaggtccgcttccggatggttgttggcaatcgcgtgggcgatgtgctgcagcatcacggtcttgccggacttgggcgacgccaccagcagcgcacgctggccgcggccgatcggcgcgatcatgtcgatgatgcggccggtgatgttctcttcagccttgatatcgcgttcgagcgtgagcggccggttcgggtgcagcggcgtcaggttctcgaacatgatgcggttcttgaccgcttcgggcggctgcccgttgaccttgtccaccttgaccagtgcaaagtagcgttcgccgtccttgggcgtacgcacttcaccctcgatcgaatcgccggtgtgcaggttgaagcggcggatctgggacggactgatgtagatgtcatccgtgctggccagatacgaggtttcgggcgagcgcaggaagccgaagccgtcgggcagcacctccagcgtgccgtctccaaagatggtttcgcccatcttggcgcgcttcttcaggatcgcaaacatcagttcctgtttgcgcatccgttgtgcgttgtcgatctcgagcgtagccgccatttcgagaagcgcagacacgtgaagcgatttgagttctgtcaggtgcatagacgaggggtacagatgggcccggacgggcgagacctaaagggaaggggggaaatgagcgaacgctcggggagttgttggtggcatcttagcacaatccgaccgggccgccaggatgtggcgcacgcacgtcggatcgtgacaaaaccgggaccgtgggtcaggtcccggcgcgcagcttacaggttgccgtcgaggaaggcggtcagttgcgacttggacagcgcgccgaccttctgggccgcgaccgcgccgttcttgaacaggatcagcgtcgggatgccgcggatgccgaacttggccggcacctgctggttttcatcgacattgatcttggcgatctgcagcttgtcgccatagtccttggcgacttcgtccaggatcggcgcgatcatcttgcaggggccgcaccattccgcccagaagtcgagcaggacgggtttgtcggactggaggacgtcagcatcgaaggaggcgtcgctcacatacttgatttgttcgctcatggcggaaaacctctggtttcgctctgtttatgttgaaggctggagacttcggagggccgaaccgttaccttacacgagattgcgcggacccgtcgggctgcctccgcagcccgcaaacaggctgtgggggccgctgccgcgcccggtgctgccgatatgttaccagtttgccgattttcaagaccggcctggcaaacactcgaaagcgcgccggcacggaaatgattctgctgcaatcggaggattcattgaaatgcttattttctatggcgccgagagattcgggtaatcgcttgcggcgtgcgggagggtgtgtcatagaatgcacttgtgcgcgccgcgcggtgccgattgagtgtggcgtgcgcgtagaatagaaagcggtccgcaggcggcgccagcggaccaatcttgcatcctgcgccactgactaggtcatcgacatgaacaccgatccccgcaagccttcgcagcccgagcccggccaggcgccggacgtggaccacctgagcgatgcgctggaccatatcagcagcgccgtggagaccaacagcatcgccagcggtgccgcacgcggcctggtctacagcatcatcgagaccctcggtaccctggtgggcgacccggacctgcccgagcatgcgcgctccggctatgagggcctgctcgagaccgcgcgcgaaatccgcgcccggctggaaggcggttcggactgagccggttccgcctgccctgcatcacacttgccgccagccgcccaggccggcggcgcccgtattgtttccgttgcatcctgacgctttcgccgaccgacgcagttcgcgcagccattccgggctgcgccccacgcgcccatgacgtcgctacgtttccgccctggccctgatttcctcgaccaggcggccaccgctgcctggtatttcctcgaccgctgcggcgcgccggaggcgggcgcgcacgtggtcgtgcccaccgcggcgcagatcccgggcgtgcgccaggcactggacgccgccgcgcgcgcgtcgggcagcccgcggctgctgccgcgcgtgctgacgctgggccactggctgctcgacctgccgcccgagggcgccccggtgcgcagcccggccgcacgcctgctggccgtgcagcaggcggtgcgcgggcaggattggctgcgccgcgccttcggcgcccagaacgagaccgccgcatggggcctgtcgcagacgctgctgtcgatctgcgacgagcttaacgcgcgctggctcgaagacgccgccatccgcgacgatgacgagatcgacggcgacgatcgcgccggcctgctgcagggcgcgctggaacggacctattcgcatctgtccgagcgcttcctcggcgaagaggcgcgcatcgtgctggcattctggcaggcgctgtccggcccggacgatccgctgccggcgcggcgccgcgccttgcgcgagctgtcgcagcagctgcgcggcccggtgatctggattgccccgaccccgcccacgccgcttgaagccgcgttcctgcgcgatgccgccgagctggtgccggtgctgcaggtcggctatgactggaccgggcagggcgggagcgatgccgactggtaccagaccctgctggcgctatggccggaagcaaggatcgtcgatgatgccgaagccgtcgcccccgcgccggccatgcctgcgctgccgccgcagcgtccgtcgatccgcgtggtcggcagcgcgcgcttcgaggatgaagccgccgcggcagccgcgcagctggtgcagtggctcaatgaaggccgccgccaggtggcgctggtcgcgcacgaccgcgtggtggcgcggcgcgcccgtgccctgctggcgcgcgccggcgcaccggtgcgcgacgagaccggctggaagctttccaccacgcgcgcggccgccgcgctgatgcgctggttcgacctgttggtgcgcgacggcgacaccgccgcgctgctggacctgctcaagagcccgttctgcctgccggaggttgccgggcgcggcgcggccatcgcgctgctggagcgccaggtgcggcgcgagggcatcaccggcggctgggcgcgcctgcgccagctgttcggccacgcaccgaccgcggcgcagcaagctgccacggaagacgagggtgccgccgaagcgccgcgccacgccgcgcacgcgctcatcgccgtgctcgccgacgaggcggcgcgctggccgcgcggcctcgcgcagcatccgctggcaacctggctggaacggctcgacggcatgctcgacggcctcggcatgcgcgcagcgctggccgcggacgatgccggcagccagctgctcgatgcgctggcgcggctgcaggagttgccgctggacgagaccggcggccatgccacgctgtcgcagggcgagttccgcgcgatgctgtcggcgctgctggaatcggtcgcctacaaggagccctcggccagcggcccggcgcgcatcaccatcctgccgctgaacggcgcgcgcatgcgccgcttcgagggcgtggtgatcgttggctgcgatgacgcgcaactgccgtccagcgccgccgagctgatgttcttctccaaccagatgcggcgcgagctggacctggaagaccgcgaggcccgctttgcgcaacaggcgcgcgacctggccgaggtgctgctgaacaacgacgacgtggtgctgacctggcaacgctacggcagccgcggcgagccgcatcatgtgtcgggctggatcgagcgcctggcggcgtgctgcgcgcgcgcgggcgtcagcatcgaagcctccgccgcagcacaggcgcacgagacctttgccgatccgcagggcatgccggcgccggcggcggagcccgcgctggtgccggtgcgctggagcgcgcaggcctacaacatgctgcgccgctgcccctaccagttcttcgccggccgcatgctgggcctggccgggttggagacagtcagcgacgagctggagaaacgcgagatcggcgaacacctgcaccacgtgctgctgcgctaccacaaggacctgcaggcgcgccgcgagcgtggcgagacgctggcggaagaccggcgcctggcccgcctggccgagatttccgaagccgtgttcggcgcgctgatggccgaggacggcaatgccattgcctactaccggcgctggcgcgaggtgatgccgtcgtatgtcgcctggcaatccgcgcgcgaggccgagggctggttctggcgcggcggcgagctcgacgccggcatcgacctgccgatgcccgacggccagccgctgcgcctgaccgggcgcatcgaccggcttgaccagggcccgggcggggcgcatgccgtgctcgactacaagacgcagagcgccacccgcctcaagcgcaagctggccgaggtcggggaagactgccagctgccgttctacggcctgctgcgcgccgatgcggcagcgggcagctgggtatcgctcgaaggcgcgcgcgagggcgcagcggcggcgcagcgcgaagtcggcctgcccgattttgaagccgccgtcatctggctggaacggcagatgcgcgacgacgtcatgcgcctgcgccagggtgccaggctgccggccttcggcgatgcctccgcctgcctgtattgcaccgcccgcggcctgtgccgcaagggcttctgggaatccaccgccgtgccggcgctgacatcatgacgccccacgatccgcaccacgtccagccttaccagcgcgacggcgagcccgtttccgaggccgagttcacgcgcgccgcctgcgatcccgcgcgctcggtggtggtagaggcctgtgccggcagcggcaagacctggctgctggtggcgcggctggtgcgcctgctgctggccggcgccgcgccgcacgagatcctggccatcaccttcacgcgcaaggccgccgaagaaatgcgcgaccgcctgctggaggtgctggcacagatgtcgcgcgacagcgatgaagacgtggtcgcagcgctggtgcagcgcggcctgacgcatgacgccgcgcgcgaggcgctgccgcgtgcgcggcgcctgcatgcgcaggtgctggccgcgcccgggcgcatggccatcgataccttccacggctggttcggcacgctgctgcgtggcgcgccgctggcctcgggcatcgtgccgggcgcggcgctgcgcgaagatgcgctgcgcatgaaacgcgaagcttgggccccggtctggcgcgcgctggccacggagcaatacaccgacttgcgcgccgcgtgggaaacgctggtcgataccgtgggcgacttccaggcacgcgcgctgctggacgcgatgttccatgcccgcagcgaatggtgggcgatgcaggagggcggcgacccgctgcaggcgctgtccgactgcctgggcgaagacgcccggggcgacgtgctgctgcaggcgctgtccgacgaaggctggcgcgatgcctgcgagtcgctggcgctgcgcctgggcgcggccggcaagactgagcagacccacgccgcccgcatcaccgatgcgctgatggcgatcaccgcgtggcgcgaagcgggcgcggcgcccggcaagcccgccgaacgggcgttcgcgcagttgcgcgccgcgttcttcaccaccaccggcggcccgcgttcgctgcggcgcaccgcggcgctggtcaaggccgccggcggcgaaggcatggtcgatgcgttgctggacgagcatgcctcgatctgcgccatgcttgacgacatcagcgcgcgttgttgcgaagccgcggtgctggcgatcaaccgcgcgctgttctgcatcggcgatgccttgctgacgcgctaccagcggcacaaggacgagcagcgcgcgatggacttcgccgacctggaatggcaggccgcgcgcctgatgtcggacgaagagaccgccacgtacctgcaggtgcggctggacgcgcgttaccgccatctgctgctcgacgagttccaggacaccaacccgctgcagtggcgcatcctgcagggctggctggccggctatgcgggcctgggcgagcgcccgacggtgttcctggtgggcgatcccaagcagtcgatctaccgcttccggcgcgccgatgcacggctgttcggcgcggccggcgagatgctgcgcgatacgttcggcgccaccgtgctgcgcaccaaccgcacccggcgcaaccgtgccgaagtgctggactgggtcaacgccgtgttcgacaccgcacgcgccgagggccgctatccgctgtacgcgacccagaccacggcactggccggaggcaacgggccggtctggctgctgccgctggtggagcccgaggacaaggccgaagacgccgttgacgatggtgcagaggacaagtccgccgaagccgcctccgcccatcgcgacacgctgctgcagccacgccggcaggccggcgattcgctgcggctggaagagggccggcgcgtggccgcgtggctgcgcctggtgcgcgacaccgtgccggtccatgagggcggcgaacagcgccccgcgcgctggagcgacatgcatctgctggtgcgccgcaagacccatctggctgactatgagcgcgcgctgcgcgaggccggcatcccgtgcctgagcccgcgccgcggcggcctgctggccacgctcgaggcgctggacctgtcggcgttgctggcgttcctgatgacgccggaatcggacctggatctcgcgcacgtgctgaagagcccgctggtgggagcgtcagacgacgacctgctggcgctggcccggatcgaaggcgagggcggctggtgggcacgcatcgagtcaggcggcctgcccgaacacgtatccgatgcgctgcgcgaaggcgtgcagcgcttgcgccagtggttgcgcgtcgcgccgcaccggccggtgcatgacctgattgaccagatcttccacggcggcgaagtgcggcgccgttatgccgaggccgcgccgccggatatccgcgaacaggtgctggccaacctcgacgccttcctgaagctgtcgcttgacctcgacggcgggcgctatccgagcctgccgaaatttatcgacgagctgcaggaaatccgccgcggcgacgagggcgaaagccccgatgaaggcggcatgggcgagagcgccgaagacgtggagccggccgaggacgattcggcgtttgccggcctcgacgcggtccatatcctgaccgtgcatgcggccaagggcctggaggcgccgttcgtggtgctgctcgatgccaaccacagtgagccggccgcggaccggggcggcatcctggtcgactggccgccgtcgtcgccggtgcctcggcatttctcggcctacggcaagcgcagcgagcgcgggctggcgcgggcgccgttgttcgaggcggaggcggcgctgggcgagcgcgagaactggaacctgctgtacgtggccatgacgcgcgcgcagcagggcctgctggtcagcggggtcaagggccgtgccagccgcagcggttcgggcgagggcaatgccgagatcgccggcagttggtatgtgcggctgcaggccgcaggcgtcggcgagatggtgccggcctatccgggcgagctggccgatgcgcaggaccaggctccgatgcccgcgcgcctgagcgagccggtgcgctttaccgacttccggctgcgctatcgcgatgcggtggatgcgcggcaggggatcgggtttgaagaagagggcgaggccgaagacgagcccgacggcatcgtcttcaacgctgcggccgcccgccacggcgagctggtgcatgccttgctggaacgcctgacgcgctatcccgaagcctttgccggcgtgccggggatcgacaccgtattgcgctggttcccgctgacgggcgcgcacaccggggcggcacggcaggcgtggcggcaacaggtggcgcaagcgctggaggcggtggctgcgatgctgcgcgcgccggcactggcgccgttgctgggggcgggggacgcccgcagcgcgcgcaatgaagtcgaactctatgacgcgcgcggcaggctgctgcgtatcgaccggctggtggagttcgacgaccgcgtggtgatcgtcgactacaagctgcggctcctgccgcaggagcatgaagcctaccgcgcgcagctgggccgctatgcggccgcgcttgcgccgatgttcccgggcaagcgtatcgaggccggcgtggccaccgcggacggcgaatggattcccgccgagcgtctggcgccgccgatgccgcagcagggctcgctgttctgacggctggcgtggcacccggacagggtgccagaatcggcgcaaaatgggatgtgcggcgcgcgcgctcgtggcccggctgtactaaagtgacagggactgcgctgcgaacgactcgtgcgtgcggagatagcgggaggggtacggcaggaggggtgtgaggtggacgagcctgaccctcggcactggcggaaaacggctgtggctgcttcgttcccgacctgaccaggttgaccgcgccaccatgcgaggaggcccgtccgagcggcattgtaccccagaccgcgataccgcggagaaattgcgttgaatgccctttgcagtggtgggtcattgcccgcggcaaatgcgtcggcttgatctggcgcaggtaacgcgggccgcggcggcccgaccattcaccgacccagaccgtggtgagccaatacatgaacgcaaacgaccagatcattcgcggcgccctggcgccgcaggaaatctccaccgaagtcctgatcgagaaatacgccaagggcgaagagcgcagcattgccgatgtcaggcaacgcgtggcgcgcgcgctggcccaggccgaacccgaggaccagcgcgaggcctggagcgcgcgcttcctgtgggcgcaggaaaacggcttcgtgccggccggacgcatcaactcggcggcgggcaccggcatccaggccacgctgatcaactgtttcgtgcagccggtgggcgattcggtgtcggagccgcgcgaaggccgccccagcatctacacggcggtggcgcaggccgccgaaaccatgcgccgcggcggcggcgtgggctatgacttctcggcgatccgaccggccggcgcgctggtgcgggccacgcattcgcgcgcctcggggccggtgtcgttcatgaaggtgttcgatgcatcgtgcgccaccgtggaatccgccggcgcgcgccgcggcgcgcagatgggcgtgctgcgctgcgaccatccggatatcgagagctttatccacgccaaggacaagggcgacctcagcaacttcaatatctccatcggcgtcactgatgccttcatgcaggccgtgcaggccgacggcgaggtcgaactggtgcatgaggccgagccgggtgccgacatgatcgccgcgggcgcctatcgccgcgacgacggccagtgggtgtaccggcgcgtgccagcgcgcaacctgtgggaccaggtcatgcaggccacctacgaccatgccgagccgggcatcctgttcctgtcgcagatcaacgccgacaacaacctttattactgcgagcgcatcgaggccaccaacccgtgcgccgagcagccgctgccgtcctatggctgctgctgcctgggctcgatcaacctgacgcgcttcgtgcgccagccgttctcgccgcaggccgaattcgatttcgatgcctttgccgaagtggtgcgcgtggccacgcgcatgctcgacaacgtgctcgacgtgaccttctggccgttgcccgaacaacaggccgaggcccacgccaagcgccgcgtcgggctgggcttcctggggctgggcagcgcgctggtgatgctgggcctgcgctatgacaccgagccggcgcggcagctggcggcgcggatctcggaacgcatgcgcgacgatgcctacctggcgtcgaccgaactggcggtggagaagggcgccttccccctgttcgatgccaacgcctacctgcagagcgggtttgccggccggctgccggaacgcttgcgcgatgccattgcgcgcaacgggctgcgcaattcgcacctgctgtcgatcgcacccaccggcaccatcacgctggcctttgccgacaatgcgtccaatggcatcgagcccgccttctcgtggacctataaccgcaagaagcggatgccggacaacagctaccgcagcttcgaggtggcggatcatgcctggcggctttaccgtcacatgggggccgacatggcccagttgccggatgccttcgtcaccgcgctgcagatgtcggcgctggaccatatgcggatgctggaagcggtgcagccgtatatcgacaccagcatcagcaagaccgtcaacgtgccggaggattatccgtacgaagccttccgcaacctgtacctggaggcgtggaaggccggcctgaaggggctggcgacctatcgccccaattcggtactgggggccgtgctgtcagtagaggcgccggcggtggctcccgctgccgtggccgacgataatccgttggttcgccccttcggcagccggccggtgggcgacctggagggggtgacgtccaaggtcgaatacctgacctacgagggccacaagaccgtctacctgaccgtcaacttcatgcgcgtcgccggcgttgccgacggcaagccggtggagatcgagcgcccggtggagttcttcatgccggcggggcagcgcagcgagggccagcagtggatcacctcgaccatgcggctgttgtcgatggtggcgcgctctggcggctcggtggccaaggcattggcggatatgcgcaacgtggtgtgggacaagggcacggtgcgctacggtacgctgctgcgccaggacggtaccgaggtgccgcgcttccatgattccgaagtggccgcgctcagctacgcgctgcagcgcatcctgatcaagcgcggcttcctggatgccgagggcggccaggtgccggtagccgcgctggcggccaggctggcccagcgcgaaggcggggggcaggcgccggatgccggggcggatctcgccagcccggtccgagcccccggcacccccggtgtcggcaccggcaagccgtgtccggagtgtggcgcgcacgccctgcacaaggtcgacggatgcgccaaatgcgctaattgcggctacgtgggcgagtgcggctgagccacgccgcgggctggttgcggccaccggagccagcccgcgcggcgcgtggcgaataaagaccgcgaggtcggggcggcggcggccggaggggggctgcattttgctacaatcgccgccatgagttatcaagttctagcgcgcaaatggcgccccagggatttcaccacgctggtcggccaggagcacgtggtccgcgcgctcacgcacgcgctggaacagcagcggctgcaccatgcctacctgttcaccggcacgcgcggggtcggcaagaccacgctgtcgcggatcctggccaaggccctgaactgcaccggccctgacggcaacggcggcatcaccgcccagccgtgcgggcagtgcaaggcctgccaggagatcgacagcggccgcttcgtcgactacatcgagatggacgccgcctccaaccgcggcgtcgacgagatggcgcagctgctggacaaggcggtctacgccccgacctccgggcgcttcaaggtctacatgatcgacgaagtgcatatgctcaccaaccacgccttcaacgccatgctgaagacgctggaagagccgcccgggcacgtcaagttcattctcgccaccaccgatccgcagaagattccggtcacggtgctgtcgcgctgcctgcagttcaacctcaagcagatgccgccggggcatatcgtctcgcacctggaccatattctggcgcaggaaggcatcggccacgacggcaatgcgctgcgcctgctggcccaggccgcgcacggctcgatgcgcgatgcgctgtcgctgaccgaccaggccatcgcctacagcgcgggccaggtctcggaagacgcggtgcgcggcatgctgggcgcgatcgaccagggctacctggtgcagttgctcgatgcgctggccgccgaggacggcgccgccatgctggcgattgccgatgccatggccgaccgcagcctgtcgtttgccggcgcgctgcaggacctgggctcgctgctgcacaaggtggcgctggcgcaggccgtgccggcctcggtgcaggacgaatggcccgaagccgatgaggtgcggcgcctggccggggtgttcgacgcgcaggaagtgcagctgttctaccagatcgccaacctcggccgcagcgagctggcgctcgcgccggacgagtacgccggcttcaccatgacgctgctgcgcatgctggcgttccggccgtcgtctgaacccactacggcgcaagggcagggcggtggtgccgcgcctgcgcgccagcgtggtgccgaagccgcgcaaaccgttgatacccgccatgcgacggctgtggccaatgccgccgaacaggccaaggccggtgctgcggcggccccggtccctgcccctatgcccgcacgggcggtccagcccgtggcagtggctgaacccgctgccgcacctgccgctgtccctgcatcccctgaagctgcgccggcacggccggccgctggcgccggcaacggggccatgtcgcccgccgccgccgcgctggcggccgcccgccaggcttccgctgcccgtgggggcggccgcaaggcgccgccgccggccatggcgccagcgccggctgccgcgcagcgcccgccggcccaacccttgcgcgcgcccggcgcggcagccgtgagtcggccgccggcaccggttgcgaaggcgcccatgcagtcgccggcagcgccggcacggcccgccgcgcgccaggcggagccggaatccgtgccgccctgggagctggcgggtggcagcgatgtgccgccgtgggaagagctgccgcctgacctgccggtcatcggcccctatgacagcgatcctggctaccgcgacaacggtttcaacgaaccggcagcgcgtgccgccgggccgcgccgggcgcccgcgcgcgaggccgagccggcgcgcgagaccgctccggtgcagccagccgcggcgccggcagagtccgccaagttcgtcgccccgcgcccgccagcagcgggcgaggatggcaccccgccggccttcaccggcgaatggccggtgctggccgccggcctgcccttgaagggcctggcgcagcagctggcctaccagagcgaactgacccaggtggtcggacgtaccttccacctgcgcatcccggtcgcggccctgggcgagaacggcgtgtccgagcggctgcagcaggcgctgtgcgaccacttcggcgagccggtgcgcgtggtctgcgaagtcggcggggtttccatcacggccgcggccgccgatgccgaggcgcgcgccgagcgccagcgccaagccgaggccgtgatcgaggccgatccctttgtccagggcctgctgcgcgattttggcggccagatcgtgccgggctcgatccagccgcgcgccgcctgatccgcggcctgcgtttgctttaccgaacttacttcaccgaatttcttaccgaatccaggagcattccatcatgatgaaaggtcaactcgccgggctgatgaagcaagcccagcagatgcaggaaaacatgaagaagatgcaggagcagctggcccagatcgaggtcgagggccagtccggcgccggtctcgtcaaggtggtcatgacctgcaagaacgacgtcaagcgcgtcaccatcgaccccagcctgctggccgagggcgaagacaaggacctgctggaagacctggtcgccgccgccttcaatgacgccgtgcgcaaggccgaagccacctcgcaggaaaagatgggctcgatgacctcgggcctgccgctgcccccgggcttcaagctgccgttctgaacgccactgtgaaggcatcgtccccgacctcgctgcaggcactggtcgaagcgctgcgggtgctgcccggcgtcgggcccaagtccgcccagcgcatggcctaccacctgctgcagcacgaccgcgagggcgcgcgcaagctgggcgatgcgctgcgcggcgcggcggaccatatccgccattgccagcgctgcaataccttcaccgagcaggagatctgcgagacctgcctggacgaccgccgcgacgcctcggtgctgtgcgtggtggaaaccccggccgaccaggtcatgatcgagcagaccctgacctaccgcggcaagtacttcgtgctgatgggccggctctcgccgctggacggcatcggcccgcgcgagatccatcttgaccggctgctcgcgcgcgccaccgagcccgagctgggcggcccggtcggcgaagtcatcgtcgccaccaacttcaccagcgaaggcgaggccaccgcgcactacatcggcgaaatgctcaaggcgcgcggcctcaaggtgtcgcgcctggcgcgcggcgtgccggtgggcggcgagctggagtacgtcgatgccggcaccatcgcgcgtgcggtgatggaccgccgcaacctctgagcacgatcgcgcggggccgattgcccgcgcgccggtcaccgcgttcttccgccttcttcagtcgcctgcctctcccatgaacctggcccgcttcgatctcgtcacgcttggcttgttcgtcgccgtggcccggcagggcagcatctcggccggcgcgcgccagtcgcacctggccgtggccgccgccagcaagcgcatctccgacctggaaaccgcggtcggcgcgccgctgttcttccgccatgccgccggcgtgcagctgaccgaggccggccaggcctgcttccaccatgcgctgaccatcctgcaggacgtcgaacgcatggccggcgtgatgtcggactacgcctcgggcgtgcgcgggcaggtgcgggtgtgcgccaacacctcggcgatcacgcagttcctgcccgacgacctggcgtcgttcatgcagcgtcatcccaccatccgcatcgagctggaagagcagaacagccgcgatatcgtcgccgcgctggtcgagaaccgcgccgacgtgggcatctttgccgaccgcacccccgcggccgggctgatgacgatcgagtaccggcaggacgagctggtcatcatcacgccgcccaaccatccgctggccgcgcgcggcccggtgcactatgccgatacgctggaattcgacttcgtcagcctgccgcaggaaacctcgctggccgcgcgcctgctcgaggagagcagccggctcgaccggccgttccggctgcgcatccaggtgcgcagcttcgatgccatgtgccgcatggtgatggccggtctgggcgtgggcgtgctgccgcgcatcgctgccgagccgcacgtcaagtcgatggggctgtcgctggtgtcgctgcaagacgcctgggcgcgccgctcgctgctgatcgggctgcgcgacccggccgggctgacagtctcggcccgtctgctgatcacccacctgtgcggggaccgggcgccgttctgacgcgcccgcgctgagcggctccgcagcctttcgcgttccgagaaagcccgcttctccgattgccgattcctggcaggccccctgctggggcacactccgttcgaacgcaatgtatgacaagccagtcattgggcttgccgcactgcaacaagacaccgcatcgcacggagacaccccatggcgcaacagatcctcgagggcattcgcgtcctcgaactcggacaactcatcgccggcccctttgccgccaagaccctggccgactttggcgcccacatcatcaaggtggagccgccggggcagggcgacccgctgcgcaaatggcgcatgctgcatgaaggcacctcggtctggtgggaggcgcagtcgcgcaacaaggagtcgatctgcatcgacctgcgccagccggaaggccaggcactggtgcgcaagctggccgccgaggccgacgtgctgatcgagaacttccgccccggcaccatggagaagtggggcctgggctgggacgtgctgcatgccgacaacccgcgcctgatcatgctgcgcgtgtcgggctatggccagaccgggccgaagaaggatgagcccggctttgccgcggtggccgaagccatggccggcctgcgccacctgaccggcgagcccggccgcgcgccggtgcgcgccggcctgtcgctgggcgacaccatcgccggcctgcacggcgccatgggcgtgctgctggcgctgtaccagcgcgacgcgcgcggcggcgaaggccaggtcatcgacgtggcgctgtacgagtcgctgttcaacctgagcgaaagtctgctgccggaatactcggcttttggcgcggtgcggcagcccgccggcggcgcgctgccggggatcgcgccgtccaacgcgtacccctgtgccagcggcgaatacgtgctggtggcggccaatggcgacgccatcttcaagcgcatgatgctggccatcggccggcccgacctggccgacgatccgtcgctggcgcagaacgatggccgcgtgaagcgcgtcgacgagatcgatgccgccatcgccgactggacccgcacgcagacggtggactcggcgctggccctgctgcgcgacgcgcaggtgccgtcgggccgcatctataccgtcaaggacattgccgaagacccgcactaccgcgcccgcggcgtgatcgagtcggtgacctcggccggcggactcacggtggaagtgccgggcgtggtgcccaagctgtcggccagccccggcgagatccatgaccgcgcgccgacgctcggcgagcataccgatacggtgctgaagcaggcaggcttcgacgacgccgccatcgccgacctgcgtgcgcgcaaggtgatcgcatgagcgccgccaccaaactgagcggtcccgcccgcgtcgagatcaacgaagtcgcgccgcgcgacggcctgcagatcgagccggtggtggtgccgaccgatgccaaggtcgcctttctcgacgcgctgtcggcctgcggctttgcccgcatcgaagccacctcgttcacctcggcccgcgccatcccggcgctggccgacgccgaggcactgatgcaccgcatgcggcgccacccgggcgttcgctacaccgcgctggtgcccaatctgcgcgggctggagcgtgcgctgtcgtgccggccggacgaggtcaacctggtgatgtcggccagcgagacccacaaccgcgccaacctgcgcatgacgcgcgagcagtcgcaagcgcaattgctggcgatgatcgaggcggcgcgcggcgccggagtgccggtcaatatttcgctgtcgaccgtgttcggctgtcccttcgagggcgaggtcgacagcgccgcggtgatggcactggccacccgcttcgccgaggccggcgcggacggcatcacgctgtgcgacaccaccggcatggcctacccggaccaggtcgcggcgctgtgcgaggccttccaggccgcgctgcccgataccggcctgaccatccacctgcacaacacccgcggcatgggcctggccaatgccctggctgcctggcagaccggcgtgacgcgcttcgacgcggccgccggcggcctgggtggctgcccttacgcccccggtgccagtggcaacgtcagcaccgaagacctggtccacatgttcgactgcatgggcgtcaagaccggcgtcgacctgggcgcgctgctcgaggtggtggccggcatgccggcgctggtcgggcgcgacctccacagccagctgctgagcgccggcccgcgcctgcgcacgcaccagccgccggcctggatggcggagcatttcgccgggcaggcatagccggcacccagacaagaacaacacatccaacagataacggagaccctcatgaagcaagcccttcaacgcaagtccgccatgcccgcacggcgcaaggccgtagccgccacgctggcggcactcggtgcggcatggttcgcgcccgtcgccctggcgcaggacggtacctatcccgcccgtccggtgacgctggtggtatcggccgcggccggtggcaccaccgacatcgcggcgcgcatgattgcggaaccgctgtccaaggcgctcggccagccggtggtggtggacaaccgtcccggcggcaacggcagcatcgccgcgcaactggtggcgcgggccaagccggacggctacacgctgatgctgcagtactcgggcttccacgtgatcacgccgctgctggtcaagaacctgtcgtgggacccggtcaaggactttgcgccggtggccaacatcctgtcggcgccgcaggtgctggtggtgcgcccgagcctgccggtcaagtcgctgaaggaactggtggcctacgccaaggccaatccggacaagctcaactacgcctcgtcgggcaacggctcgctgcagcacgtctcgaccgagctgctgaaccagatggccggcacgaaaatcacgcacgtgccctacaagggtaccggtccggccatgaccgacctgctgggcggctcggtggacctgaccatcaccacgccgccgccgctgatggcccatatcgccgccggcaagctgcgtccgctggtggtgaccagcaagacccgcctgcccagcctgaaggacgtgccgtcggcgcccgaggccggctaccccgacctggacgtgtcgtcgtggttcgcgatgtacgcaccggcaggcacgcccaagccggtgatcgacaagctgactggcgaaatcgacaagatcatgcgcaccgaagccttccgcaagaaggccgaggacctgggcgccgaggccaagtacatgaacccgcagcagctgggtcagtaccagaaggcggaactcgcgcgctggggcaaggtgatcaagtccgccgacatccacgcggaatgatggcgcgggctgcggcaaggtgatcgaaaggtaagggcgttatgctggcgggtttgctaggtgttgataccgatgcggtgcatcgcaccgtccggtagcatcgcaatttgccgcaccgcggcgcgcccccttcgagcgcatgtcgccgcagcgccagtccacacgggtaggagatctcgcatgtataacaagaaattctggaagcaattcctgatcgcgctggcgctgttcctggccggctggttcaccttcggccaggcgcaggcacagggcaagcccgagaagaccaaggtcaccatcgcggtgggcggcaagaacctgttctattacctgccgctgaccattgccgagcgcctcggctacttcaaggaagaagggctggacgtcgagatcgtcgacttcgccggcggtgccaaggcgctgcaggccgtggtgggcggcagcgccgacgtggtctcgggcgcctacgagcacaccatcaacctgcaggccaagggccagcgctaccaggaattcgtgctgcagggccgcgccccgcagatcgtgctggtggtgtcgaacaagaccatgcccaacttcaagtcgatcgccgacctgaagggcaagaagatcggcgtgaccgcgccgggttcgtcgaccaacatgatggccaacttcgtgctggccaagtccgggctgaagccttcggacgtgtcgttcatcggcgtgggcgccagcgccggtgcggtggcagcgatgcgctcgggccagatcgatgcgatggccaacctggacccggtgatctcgatgctgacgcagaagaacgaagtgcgcatcgcctcggacacccgcacgctcaaggacacccaggccgtgttcggcggcaacatgccgtcgggctgcctgtatgcgtcgcaggcgtttatccagcagaaccccaacaccacgcaggcgctgaccaatgccatggtgcgcgcgctcaagtggctgcagaaggcgggcccgtcggacatcgtcaagactgtgccggaaagctacctgctgggtgaccgcgcgctgtacctggccgcgtgggaaaaggtcaaggaagcgatctcgccggacggcaccatgccggccgacggcccgcgcaccgcgttcaacgcgctgagccagttcgacgccgagctcaagggcaagccggtcaagctggaagagacctacaccaacgccttcgtgcagaaggccaacgccaagtacaagtaagaccctcgccgtcgatgccatcggcccgctgtccgcagcgggcctttgctttgaatccttgacggccaatccatcatcacccgcccgcgccgcgccccccggcgccgccacggcgggaccgagacggttcaccatgagcactcccgcactttccctcgacaaggtcacctgcacttttgtctcgcgcgatgaccgcagccagcgctataccgcggtccaggacgtcacgctgtcgatccagcccggcgaattcgtctccgtggtcggccccaccggctgcggcaaatccacgctgctcaacgtcggcgccggcctgctggaaccctccagcggcgagattcgcgtgttcggcgagcccctgcgcggcatcaaccgccgcgccggctatatgttccagaccgaggcgctgatgccctggcgcagcgcgctggacaacgtcgtcgccggcctggagttccgcggcgtggcgcgcgccgaggccgtgcagcagggcgaggaatggctgcgccgcgtgggcctgggcggctttggcgaccgctatccgcaccagctctcgggcggcatgcgcaagcgtgttgcgctggcgcagacgctggtgctggacccggacatcatcctgatggacgaaccgttctcggcgctggatatccagacccgccagctgatggagaacgaggtgctggagctgtgggccgccaagcgcaaggccgtgctcttcatcacccacgacctggacgaggccattgccatgagcgaccgtgtggtggtgctgtcggccggccccggcacacacccgatcggcgagttcgagatcgacctgccgcgcccgcgcgacgtggccgagatccgcaaccatccgcgttttgtcgagctgcacgccgcgatctgggacgtgctgcgcgaggaagtgctcaagggctacgcccagcagcgcaaggtggcgtgagccctccaacctaacaagacctgaatcccgatggcattccgtactgattccaagggcatgttgcgcgtctggcagctgctcgtcctggtggtgatcctcggcgtgtggcatatggccacgcgctcgcagcaggttgcctttttcttcggcgaaccgctgatggtggcgcagcgcatctggagctggtttatcgtcgagcgcgatatctacctgcacctgggcgtgacgctgatcgaaaccgtgctggccttcggcatcggcacggtggcggggctgggcgtgggcctgtggctggcgctgagcccgatgacctcggccatcctcgacccctacgtcaaggccatgaactcgatgccgcgcgtgatcctggcaccgatcttcgcggtctggttcggcctgggcatctggtcgaaggtggcgctggcggtgacgctggtgttcttcatcgtcttcttcaacgtctaccagggcgtcaaggaagtgagcccggtggtgctggccaacgcgcgcatgctgggcgccaaccagaagcagctgctgcgccatgtctacctgcccagcgccaccagctgggtgttctcgtcgctgcatacctcggtgggcctggccttcgtgggcgcggtggtgggcgaatacctgggctcggcgcgcggcgtgggctacctgatcctgcaggccgaaggcaccttcgacatcaataccgtgtttgccggcatcgtggtgctgacggcgtttgcgctggtgctggactggatggtcggcatgggtgagaagcggctgatgaagtggcagccgaagagcggggagacggagaagctttgatgcaggacttgccggtaagcgttgctggccggcggtttgccccctctcccgcttgcgggagagggggcgcccaagcggtcaagagcaagtctcgggtttgtggccggcagcgctgaagtttacagacaccgttagcccgcctccgggcgtatccgcaagctccaccgctgcaccatgcagccgcgcgatctcgcgcacgatcgacagccccagcccggtcccttccacggactgtccgctctcgccgcgatagaagcgccggaacaccgcatcgcgctctgccggagcaatgccggggccgttgtcgatcacctgcagccgcggcacgccgccgtgcagcgccacgcgcaccgtgaccaccgcaccgcgccccgcatagcggatcgcgttgtcgatcagattgcccgtcagctcctgcagcagctccgcctgcccggcgacctccaccgacccttcctgctcgaagcccaggtcgacctcgctgccacgcgccaccggcgcccagtccagtgccacgccttgcgccagcgcatcgagccgcagcggcccgagcgtgggcatatagcccgcatcaggctccagccgcgacagcgacagcagctgctgtacccccttggaggcatggcgcacggtgccgtgcagcagccgcatatgctcgcgcacgcgttcagcgtcgcgctcgcgcagcgccagctcggactgcgcctggatgatcgccagcggcgtcttgagctggtgcgcagcatcggcaaagaagcgcttgcgcgcctgcaccatgccgtggagccggtccatgtactggttcagcgcctgcaccagcggcttcatctcggcgggcaggtccttctgctcgatcgggtcgagctgcgtgccgcgtcgcgccaccgtgtcggagagccggttcagcggccgcagcccgcgccgcacgccgagccagacgatgcccagcgccagcgtcaccagcatcagctcctgcagcagcgagccgatcaggatgtcgcgcgccagcagctggcgcggctcgatggtttcgcccaccagcacccacaccaggcgcgtgcgtgccgagcccacgtcgtgcaccggcagcgcctgggccgccatgcgcagcgggtgctcgcggaagacagtgtcgtagaactcggtgcggtacagccgcagcggcgcctcggccggcatcggcaggtcgtcgtagccggtcacggttgcgccgtcctcgtcgcggatgcggtagaagatgcgcgggccggcttggtcgtcgaagagttccagcgcgaggtttggcacgtcgacctggagccgcccctcgcgcaggcggatgccttcgcgcattgcgcgcagcgacgcctccagcgtgcggtcgaaggcgatatgcgcggcagacatggcgcgctcataggtcagccacgcatcgaaggcgagcagggccatcagcggcagcagcagccatagcgacagctgcaggcgcaggctgggcgcctgtcgtggaagcctcatgccgccggccgcgcttcgagcagatagcccagcccgcgcagcgtgacgatggccacgccgctgccgtcgagcttcttgcgcagccggtgcacgtagatctcgattgcatccgggttgaccgattcgtcgatgccgaagatcttctccgacagcgccgccttgttcaccgcgcgcccatcgcgcagcagcagcacctcgagcacggcgcgttcgcgcccggtcagcggcagcagctcgccgtgcagcaggacggcacggctgacgctgtcgtagtgcagcgggccgcaggcgatctgcgtgctctcatgcccgtgggcacggcggatcagcgcgcgggcgcgcgcttccagttcggacaggtcgaagggcttggccaggtagtcgtcggcgcccaggtccaggccgcgcacgcggtcttcgaccgagccgtgcgcggtcaggatcagcaccggcagcgggttgcggcgctggcgcaggcggcgcagcacttccaggccgtccagtccgggcaggcccaggtccaggatcagcagcgcgtagtcctgcgtgctgagcaggttgtcggcgctgcggccgtcgtgcatgcagtcgaccgtgaagccggcctggcccagggcctggctcagggaattggccagcatcacgttgtcttcggcaagcaggatacgcatggggcagggcagtcaggcggcaatacggaaatccggccggaacggccgaggccagacagatacagggaagtgcgccggcttagaagctagggaaacccccaatcccgcagcggcgccgtgcccgcgaaaagcctgcattccgaaagcgaactgaaagtgcgcgtcccctaccatccggccggctaatgattcacacaacaagcacaagcaaggagatagcatgaagcgtagggcaatggcattcgcagcgatgggtctggctgcggccggatcggcatccgcccaatcgagcgtgaccatgtatggcctggtggacgccggcatcgaatatgtcagccacgcgggtccggacggctcggcggtcaagctgacctcgggcggcaagaacacctcgcgctggggcatccgcggcagcgaagacctgggcggcggcctgaaggcgatcttcgccctggaaagcggcatcgccatcgacaccggcaggctggacaccgacaacacgctgttcgatcgccgtgccacggtgggcctggcaagccgctacggccaggtggtgctgggccgcacctttaccacgacctacgacttcatgctgccgttcgacccgatgggctacgcgccggcctattcgtgggctacttcgtcgaccgccaccggcggccgcaaggacggcctgttctcgcgcgcctcgaacgcggtccgctatgacggcagcttcggcggcctgaagctgggcgccaccgtggccatgggcgaggtggcgggggacttcaagagctcgtccaagtacgcgctgggggtgggctacagcgccggcaagtttgccgcggccgccacctgggaccgccagaacggcgccggcagcagcaccacgccggccgacagcaccgactacatccagggcatccatgccggcgccagctatgacttcggcgacctgaagctgtttgccggctaccgcaactacaagcgcaccttcaccaccggcgcggcgacggaccgcagcgacatgtactggggcggcgccagctatgacttcacgccggccttcacgctgtacggcgcggtctacaagcagaacatcaagggcggcaacaacgccgacccgatcctgttctcgctgcgcggccagtacgcgctgtccaagcgcacgctggcctacctgtcggtgggctatgccgatgcgcgcaacgggcagaacgtcagcgtctcgcgcgacctggtcggcttcgccaacaaccagaccggcgtcatggccggcctgcagcaccgcttctgaggaaggggcggcctgaatggcctgaatggccggaatggcctcatcggcctgttgggaactgccggccgcctggcgcatgggtgtgcgccatcgagggcggctggcagcttgaggcgcgttgcctcagccgggcgcagggcgtagccgcacgccttgcgcccttcttttaccggcgggcagggcgcgccgccggcgtgcgtgccgctcagggcacgatcacgatcttgccggtgaccttgcgcgcttccatgtccttgagcgcctgcggagcctgctccagcggatagcgcgccgagatatgcgggcggatcttgccttccttcatccagcccagcatctgcgccatattggcctggttggccttgggctcgcgccgcacgaagtcgccccagaacacgcccaccagcgaggcgcccttgagcagcgccaggttcagcggcagcttggggatctcgccgttggcaaaacccactaccaggtagcggccgcgccagccgatcgaacggaaggccggttcggcatagatgccgcccaccgggtcatagatcacgtccggacccttgccgtcggtcagcgccttgatgcgttcgcgcaggtcctcggtgctgtagttgatcagcgcgtcggcgccgtgctccttgcacaccgccagcttctcgtcggtcgaggcggcggcgatcacgcgcgcgccgatggccttgccgatctcgatcgccgccaggcccacgccgccggccgcgcccagcaccagcatggtctggccggccttcagctcgccccggtcgatgaccgcgtggtgtgaggtgccgtaggtcagcgtgaacgccgccgcggtctcgaagtcgatgccgggcggcatcggcaccactgacgccgcaggcgccttggcctggctggcgaacgcgccgttgcccaggtaggcgatcaccttgtcgccgggcttgacgtgggtgacgccttcgccgaccgcattgaccacgccggccagctccgagcccgggctgaacggcagggcaggcttggcctggtatttgttctggatgatgagcacatccgggaagttgacggcggccgccttgacgtcgatgaccacttcgcccttggccggcaccaggtcaggcagggtttcgatggtcagcgaatcgggcgggccccaggctttgcacagtacggctttcatcttgtctccggtgatgttggtggcatttcacgccagtcaagcttatgcgggcgggcagggcaagtgtagcgtagaaatagcacggtcgttctgttccatgtccaagctatggaggtggttatttgcggcctgcatacagcgccagaaacgtgctttcagggcggcgcaggggccgcttgcgcgcgcgcgctcaggtacaatcgcgccatgcatatccttctcgccaacgacgacggttatctcgcgccgggactggccgttttgcatgccgcgctcgcgccgctgggccggatcacggtcatcgcgccggagcagaaccatagcggtgcctccaactccctgaccctgcagcggccgctgtcgatctacgaagcgcgcgaaggcgtgcaaaaaggttttcgcttcgtcaacggaacaccgaccgactgcgtgcatatcgcgctgacgggcctgctggaagagaaacccgacctggtggtgtccggcatcaaccagggacagaacatgggcgaagacgtgctgtactccggcaccgtcgccgccgccatcgagggctacctgctgggcattccgtcggtcgccttctcgcaggtggacaagggctgggagcacctggacgccgcggcacgcgtggcgcgcaccgtggtggagcgcatcatcggcacgccgccggccgagccgttcctgctcaacgtcaatatcccgaacctgccgttcgaacatatcaagggctaccgtgccacgcgcctgggcaagcgccatccgtcgcagccggtgatcacgcaggtcaatccgcgcggcgacaccaactactggatcggcccggcgggcgatgcgcgcgatgccagcgagggtaccgatttccatgcagctgcggcgggctatgtctcgctcacgccgttgcagctcgacctgacgcaccgcgggcagctcgacgcgctcgaccagtggttgaagtaggccaccgatccgcagtgtcgcgcccccgatgagcaccacgccccctcgcaacaagtttccgctgccgctcgatgcggtagtcgagcgcaagcccgcaccggcccgcaccgccggcttgcctgccgtgggcacgccgcggccggccgcgcccacaccggcgccagccaagccggccaagccgcgcctgccgcgcaccgccgcaccggcgcccgcgccggtgcctgcaagcgcggtcgagcaacgcgcctcggcggccaccgcgggcggcggcggcatggcctcggcacgcgcgcgcgcggcgctggcggcgcggctgcgtgccgcgggcatccgcgacgagcgcgtgctgtcggccattgccaccgtgccgcgccacctgttcgtcgagccgggactggcatcgcaggcgtatgaggacgccgcgctgccgatcggccaccagcagaccatttccaagccgtcggtggtggcgcgcatgatcgagctgctgcgcgagggcctggccgccgacgcgccgctggagcgcgtgctcgagatcggcaccggctgcggctaccaggccgcggtgctgagccaggtcgcgcgcgaggtcttctcgatcgagcgcatccgcccgctgcacgagcaggccaaggccaacctgcggccgctgcgcgtgcccaacctgcgcctgcactacggcgacggcatgctggggctgccccaggcggcgccgttttcggccatcatcctggccgcggccggcatggaggtgcccgaggcgctgctggagcagctggccatcggtgggcgcctgatcgccccggtggcggtgatgccgccggcgggcgtgccaggccagaccgtcacgcagcagctgttgctgatcgagcggcgcaaccgccatcgatttcacagaaccgcgcttgaagccgttttctttgtgcccttaaaatcgggcaccatctgagtcgaactatgcacaacatcgtgaaatcgcaatatttcgcacgcgccggacaactttttgcggcctcggcgctgacggccctgctggccgcctgcgccaattcgccgatgccggcacctgtggttgaccgtacctccacttccggtaccacggccgcgacgctggaaccggcaccccccggatactatcgggtcaagcgaggcgataccctttaccgaatcgcgctggagaacggccagtcgtatcgcgatgtggcaacgtggaacaacctgaccaatgtgaaccagatcgaggtcggccagctgctgcgcatcgtgccgccgggtgccgacgtcaacactgcgcccggcgtggccaccatgccggtggcgccgggcacggtgcaggcgcagccgatcgaccaggcccgcccggccgccacgccggtgcctccggccgcggccgcttcggcgcctgcggcaacgcccgccgcgcccgccgcggccgccgcgccggtcaccgatggctcgatgaagctggcctggccggcaaccggccagacggtcgggaaattcgacgacaagggtaataaaggcatcgatattgcgggcaagaagggcgatgcggtgctggccgcggacgatggtcgggtgattcacgttggccccttgcgcggctacgggaatcttgtcatcatcaaacacaatgagacatttcttactgcttacgggcacaacgacaaggtgctcgtggctgagcaatccgcggtccgaaaaggccagaagattgcggagatgggcaacagcgataccgaccgggtaaagcttcacttcgaagtccgcaagaacggaaaaccggttgatccgatgcggtacctgccgccacagtgagggttcatgccacgccagaaaactgtctcctccggaaccgtaagcagggctcgccgtcccaagcagccggaagtgaaggctggtgtggcacatcccgacgcgcgcgccgatgctgaaggcttcgagcctgatctcgccgccgaactgattcccgtgaccgacgagcccatcgccacgtccacttcggtgggcctgcgcgaggccgacctgcttgccgacgacagtgagcgcatcgtgcgcgacgacgacgaggacgagtcggaagacgaggaagaagagagcgcggaaaatggcaccgacagtgccgcccccgagcatgatgatttccgcaccgtgctgcataccgagctggctgcggacaccgtccagcactacctgaaccgcatcagcatcaagccgctgctgtcggccccggaagagctgcatttctccacgctggccaaggacggcgactttgccgcgcgccaggtcatgatcgagcgcaacctgcggctggtggtcagtatcgccaagggctacctcaatcgcggcgtgccgctgctcgatctgatcgaggaaggcaacctgggcctgatgcacgcgattgaaaaattcgatccgtcgcgcggtttccgcttctcgacgtacgcgacctggtggatccgccagagcatcgagcgcgccatcatgaaccaggcgcgcacggtccgcctgccggtccacgtgatccgcgaactcaaccaggtgctgcgcgccaagcgccatctggagaagggcggcaccgacgggcgcgacgccagccttgaagacatcgcccacctgctgggcaagacgccggacgaagtgcaggacgtcctggcactcaacgaacataccacctcgctcgatacgccgttcgatctcgatcccggctcgagcctcctggatttcctctccgacgagcacaacgccgcccccgaccaggaggtggcgcaccgcgagctggaagggctgatgaagctctggctggcgcgcctgtcggaaaagcatcgctatgtggtggagcgccgcttcggcctcaaccatatcgagcccgccacgctggaagagctggccgaggaaatgggcctcacgcgcgagcgcgtgcgccagatccagcaggaggcgctggtcaagctcaagcggcatttcgcttcgcaaggtgtcaggaaggacgctgttctatgacccctgtgctggtattcgacatcgagaccattcccgatgttgccggcctgcgccgtttgcatgaccatcccgatgcgatgagcgacgccgaagtcgccgagcatgcgtttgccgcccgccgcgaaaagaccggcagcgattttctcccgcactacctgcagcgcatcgccgcgatttcctgcgtgctgcgccgcacgcaccgcgacggctcggcggtgttccacgtcggctcgctcggcacgccggaagacggcgaggccacgctgatccagaagttctatgaactgatcgcgcgctacagcccgcaactggtttcatggaacggcggcggctttgacctgccggtgctgcattatcgcggcctggtcaacggcgtcaccgcgccgcgctactgggagatgggcgagggccgcgacgacgacagccgcgacttcaagtggaacaactacatcagccgctaccacatgcggcacctggacctgatggacctgctggcgatgtaccagccccgcgccagcgcgccgctggatgacctggccaagctgtgcggcttcccgggcaagctggggatggacggcagcaaggtctggcaggcgttccaggccggccagctcgacgagatccgcgcctattgcgagaccgacgtcgtcaacacctacctgatgtactgccgcttccagctgatgcgcggcggcatgtcgccgcgcgagttcgacatcgagatggagttcgtccaggagtcattggccgaactgcccggcgagcagtggatggaatacctgcaggcattccggctgcagcgtctcacgcccgaagccgaagacctcgactgagcacggcggcgacgcgccgccgacacgaattcacaaatccagcgacagcaggatcggctggtggtccgagctggccgtatcggcatcgacctcgcagcgccggatccgcccggcgagattctcggtcacgaacatgaaatcgcaggcgaacggcggctccggccattgctccttgtcgtacagggcgcaggtcggcgcatgcggctggcctgggtgtgtgtgcagccaggcatcgcgccagggcggcgtggcatcgtcaaagggctcgagcacacggcggtaggcgatatcgtcaggcttgctattgaagtcgccgcacaggacggcctcggccgggcgcggctccggcgtgaacgggcccggccatttctcgctgcggccggggcggcgcgcatggtcgcaggcttcggcgtgccaggtgcgcaaggcttcggcctgggcggcgcgctggtgtgatgagtaatactccaggtgcgtgcagatcacgcgcagccgccgggtgctgacttcgaccgaggcttccagcgccacgcgcggcatcgaggccacttgcgggtccgccggccagggcagggcgtggcggaagacttcgcgcaccggcaggcgcgtggcgatgaggttgccgaactgcttgcgtcctccggtggcggtgcgccggtcgacaccaggcgcgtagagcaggtggtagccgggcagcagggcagtcaactccgtcacctggtcttcccccgggctgccgcgcagttcaccgaagccgcgcgtgacctcctgcaggcagatgacgtcggcatcggcaatgccgcgcaaggtgtcgacctgccggcccaggtcgacatgcccgtcggcgccgcgaccccattggatattccaggaaatcagttccatttgccgtctccgtcacgtcgccgggaagcagccgccgatgccggcccggtctggcatacaatcccgctttcacaaaacaatatgtcaggtttcgtctgatgtcccaagccgtgtcctccccacaagaaacgccggcagccgcggccgctgttgccgatcaaggtgctgctcccgtcgcaaaagagtcccgtgtccgcgccgacgctggcgcccccgcggccgatcccgtggtgtcgatcgacagcctcgacatggaggcccgcggcgttggccgcctgctgaatgaggacggcacgcccggcaaggtgatcttcgtcgaaggcgcgctgcccggcgagaccgtcagctaccgcagctttcgccgcaagcccagctacgagcaggcccacctggtcgaggtccggcaggaatcggtgatgcgcgtgaagcccggctgccagcatttcggggtctgcggcgggtgctcgatgcagcatctcgattcgcgtgcccagctggcgatcaagcagcgcgtgctggaagacaacctgtggcacctgtccaaggtgaagcccgacgtggtgttccgtcccatcgccgggccggactggggctatcgctaccgcgcgcggctgactgtgcgccatgtggccaagaagggtggggtgctggtcggcttccatgagcgcaagagcagctatgtggccgacatgacccgttgcgagatcctgccgccgcacgtgtcggccatgctggtgccgctgcgcgagctggtcggcggcctgtcgatccgcgaccgcatgccgcagatcgagctggccgtggggcaggaagtcaccgcgctggtgctgcgcatcctggagccgctgaccgatgccgacaaggacctgctgcgcgccttcgccgaccagcacaaggtgcagttctggctgcagcccaagggcccggatacggtctacccgttctacccggccgatgccgagctggcctatacgctgccggaattcggcatccgcatgccgttcaagccgaccgatttcacccaggtgaatcaccagatcaaccgcgtgctgatcggccgcgcgctgcgcttgctggacgcgcagccgcaggaccgcctgctcgacctgttctgcggcatcggcaacttcacgctgccgctggccacgcagggcaagtcggtgatgggcatcgaaggcagcgaggcgctgaccacgcgtgcgctggccaacgccgaatacaacgggctggcggccaggaccgagtttgcatgccgcaacctgttcgaggtcacggccgaggacattgccgcgctgggccgctttgaccgctggctggtcgatccgccgcgcgaaggtgcgctggccgtgtgcaaggcgctgggcgaactggcgcagcagggcagcaacgtgctgccgcagcgcatcgtctacgtctcgtgcagcccagccacgctggcgcgcgacgccggcctgctggtgcacggggcgggctaccggctcgccggcgcgggcgtggtcaacatgttcccgcacacctcgcacgtggagtcgatcgcggtgttcgagcgcggctgatcgcgcaagtcgcaccaaagaaaaaccggccatcaggccggttttttcatgctgcaggggaggttgccgtcactcgcggctgccgccgaagatgcccagcagcgccagcaggttgacgaagacattgtacacgtccaggtagattgccagcgtggcggtgatgtagttggtctcgccgccgtttaccacgcgctgcacatcgaacaggatgtacgccgagaagataccgatggcgatcaccgacaccgtgatcatcagcgagggcagctgcagccagatattggcgacgctggccaggatcagcaggatcacgccgacgaacaggaacttgcccaggccggagaaatcacgcttgctgaccgtggcgatggtcgccattgcgccgaataccgccgccgtgccgccaaaggcatacatgatcagcgccggcccgttggagaactgcagcgtcacgccgatcagccgcgacagcattagccccatgaagaacgtgaaggccagcagcaggaccacgcccatgctgctgttcttggtcttctcgataccgtagaagaacccgaacgcaatgcccaggaacaggatcagcgacaggaacgggttgcccgccatgaagctgaagccggtggccacgccgatccacgcgccgagcacggtggggatcatcgagagggccagcagccagtaagtgttgcgcaagacccggttgcgaacgacgacgtcagtgacggtcgacgcactgttgccgaaaccgtaggtgttcagcttgttatccatggtgactcctgtctcaaaacggtgaggcgccgggctgcgaggcttcggatgcgaagattcgtatggaacccggacggaaccatcgtcaatgtggcacctgggaggctaaattgcaagggcgaggtaactcatgagtcacctattgcatgctttgcgccgttcggtgccgctcacattggatgttagccggggcggcgtgttcctggcatgacaaggttgtaatgtgctcattggcgcactttgcgaccggttgtgcggcaagggcggcccgacacacgccagagcagggaagaccctcgaaagggtcatagtcttcgtgctagaatcgcacgtttaatccatttgtaaccccttcatttttcggagtttttcatggcgatcgaacgcaccctgtcgattatcaagccggatgccgtggccaagaatgtcattggccagatctacgcccgtttcgaggccgccggcctgaagatcgttgctgccaagatggtgcacctgtcgcgcggcgaagccgagcagttctacgctgtccacaaggagcgtccgttcttcaaggacctggtggatttcatggtttccggcccggtcatgatccaggccctggaaggcgagaacgccatcgccaagaaccgtgacctgatgggcgccaccgaccctaagaaggccgagaagggcaccatccgcgccgattttgccgacagcatcgacgccaacgccgtgcacggctcggacgccgctgaaacggctgccgtggaagtgtcgttcttcttcccgggcatgaacgtctacagccgctgattgtccggcgctgctgccaggactagactgacaccgaagctgagtttgccgccatgaacgctctcgtcaacctgctcgacctcgacgcggacgcgctcaccgcttattgcggcgagctcggcgagaagccgttccgtgcgcggcaactgcaacgctggatccaccactacggtgccagccgcttcgacgccatgtcggatctcgccaagtcgctgcgcgaaaagctcgcgacgcgggccgagatccgcgcgcctgccgccattaccgaccacctgtcggccgacggcacgcgcaagtggctgctcgacgtgggccagggcaacgcggtggaaacggtctacatccccgaggaaacgcgcggcacgctgtgcgtttcctcgcaggcagggtgcgccgtcaactgccgcttctgttccaccggcaagcaaggcttctcgcgcaacctcagcaccggtgaaatcatcggccagctgtggatggcggagttcgccatgcgcgaacaactgggccgcggccccaaggacgaccgcgttatctccaacgtggtgatgatgggcatgggcgagccgctgctgaactacgatgctgtcgtgccggccatgcgcctgatgctcgacgacaacgcctacggcctgtcgcgccgccgcgtgacgctgtccacctccggcgtggtgccgatgatggaccggctgtccaaggatctcccggtggctctcgccgtgtcgctgcacgcgtccaatgacgccttgcgcgacgtgctggtgccgctgaacaagaagtacccgctggccgaactgatggcggcatgccgccgctacctggaattcgcgccgcgcgatttcattactttcgaatactgcatgctggacggcgtcaacgacggcgtcgagcatgcgcgggaactgctgaagcttgtggccgacgtgccgtgcaagttcaacctgatcccgttcaatcccttccccgaatcgggcctgaagcgctccaacaacgatcagatccggcgctttgcgcaggtgctgatggacgcagggatcgtgaccaccatccgcaagacccgcggcgacgatatcgacgccgcctgcggccagcttgccggtgaggtgaaggaccgcacgcgcctggtcgagcgcggcaagttcggcaagatcacgccactggtgccggtcgctgcttccggccagcctcgggaggttcgccctgcatgatccgtctgatcgctgcggccctgctggggctgctgatgttgtccggctgccagctgccgcatgcgccggcgcaggatccccagaccgcttccgaccagaccgatgcaaggcgccgtgccggcatccggctgcagctcgccaccaactatctggaggccggccagaacgcggtcgcccttgacgagatcaagcaggccattgccatcgatccggcgcttgccgatgcctaccatgtgcgcgcgctgatctacatgaacatgaatgagcgcacgctggccgacgacagcttccgcacggcggtgtcgatgcgtgccaacgacggcgacctgctcaacaactacggctggttcctgtgccaggaagggcgctacggcgaggccgtgccgatgctgcagcgcgcgatggcggcgccgtcagcaggcggccccgccaagccgctgatcagcctgggcgcgtgcgaactgcgccagggccacagcgccgaagcggaaaagaacctgaaggccgcgctcggctacgaccgcaacaacccggtggccaacaccaacctcgcgctggtcttctaccggcgcggcgacttcgcgcaggcccggcaatatatccagcgcgtcaacaacagccaatatgtcaatgcgcaatccctctggctgggagcgcgcattgcccaccgtcagggcgacagccgcacgcaggatgcgcttggggcgcaactgcgcagccgcttccccgactcgcgtgagttgaccgcctacgaacaaggagcatgggatgagtgagcacgaccgcgccgcaggccaggccgtaccgacgcaacaagtcggcgggggcgcgcacgaaggagaacgcgaagctgccgcacgcgagatcggcgcagcgctggcgcgcgagcgcgaggcgcagcgcatgtcggtggaagacgtcagcgcgcgcctgaaggtggctgcaggcaagctgcgcgcgatcgaggccggcaacctgcaggcactgcccgacgtgaccttcgccaagggcgtgatgcgtgcctatgcgcgcatgctgcacgtcgacatcgacccgctgctggcacgcttccagccgcgcccggtggcgcaggtggcggaaattgcccggcagcgcgaaggtggcatcaatgcggccttcgacgaccgcaaccgcttccgctcgggcggcaacggcggccgctgggtctggctggcgctggtggccgtgctggtggccgcgggcggctggttcgggcttgaccatatccgcgcatggatcgatgcgcgcagcagcgctgccgagaccgtaacggctgaagcgcctgccgtgatccagagcacggaagccggcaccgtgacggcggtgctgccgccggtcatggccgccagcgattcgccggcgccgtctgccgaaaccgctccggccagtgccgccgcggcccccgtggccgcgctggcgcccgcagccgcttccgcgcctgcagctgccgcggcaccggctgcgccagcaggagagggcgaactgcagatccgttttgccgccgatacctggtatgagatccgggacaatagcggcaagatcgtcatgggcggtaccgccaaggctggccagaccgtggccggtggcggcacggccccatacaaggtggtgatcggcaacgtcaagggcgtcgagtcgctgacgcgcaatggcacgccggtcgacctgaaggcagccaaccgcaacaacgtggcgcgcctgacgctgccctgacgcgggcgcgaggtgcgtctttgcaaggtggtaacgctatgaaccaacagctctgtctcccggtcctgcccggtccgctgccgcgccgccagacgcgccaggcgcgcgttgcgtggggcgacaatgtggtgaccattggcggcggtgcgccggtgcgcgtgcagtcgatgaccaacacggatacggtcgacgccatcggcacggccatccaggtcaaggaactggcgcgtgcgggctcggagatcgtgcgcatcacggtgaacacgcccgaggccgccgccgcggtgccgtcgatccgcgagcagctcgaccgcatgggcgtggacgtgccgctggtgggcgacttccactacaacggccacaagctgctgcaggactatccggcctgtgccgaggcgctgtccaagtaccggatcaaccccggcaatgtcggccagggcgccaagcgcgacacgcagttcgcgcagatgatcgagatggcgtgccgctaccacaagccggtgcgcatcggcgtgaactggggcagcctggaccaggacctgctggcacggatcatggacgagaacgccgggcgcgccgagccgtggccggcgcagagcgtgatgatcgaggcgctgatcacctcggccatcgactcggccaagaaggccgaggaaatcggcctgccgggcgaccagatcatcctgtcgtgcaaggtgtcgcaggtgcaggaactggtcgcggtgtaccgcgagctggcacgccgctgcgactacgcgctgcacctcgggctgaccgaggccgggatgggcagcaagggcatcgtggcgtcgaccgcggcgctgtcggtgctgctgcaggaaggcatcggcgacaccatccgcatctcgctgacgcctgaacccggcgcgccgcgcgagaaagaggtgtacgtggggcaggagatcctgcagaccatgggcatgcgcaacttcaccccgatggtgattgcgtgcccgggctgtggccgcaccaccagcaccgttttccaggagctggcggcaagcatccaggcctatctgcgcgagcagatgccgcaatggaagaccgcctacccgggcgtcgaggaaatggatgtggccgtgatgggctgcatcgtcaatggcccgggcgagagcaagcacgccaacatcggcatctcgctgccgggctcgggtgaatcgccggcggcgccggtgttcgtcgacggcgtcaaggtgaagacgctgcgcggcgagcgcattgcagaagaattccaggcgatcgtagatgaatacgttcgcacacattacggcccgggcgctgcgcgggccgacaaagaagtggcagcctgagccggaccggccgggtgccagcagcctgacaagaacagaatgacgcaatccgagaacgttgccgccgcaggcggtgccaagaccgaaccgaaggtgcgccccgccaaggccctgcagggcgtgaagggcatgaacgacatgctgccggcggacgcgccgctgtgggagcatttcgagaatgccgcacgcgccatgctgcgtgcctacggctaccagcagatccgcacgccgatcgtcgagcatacgcagctgttcgtgcgcggcatcggcgaggtcactgacatcgtcgagaaggagatgtactccttcaccgattcgctcaacggcgagcagctgacgctgcgccccgaaggcaccgccgcggccgtgcgcgccaccatcgagcacaatctgctgtacgacggccccaagcgcctgtggtacaccggcccgatgttccgccacgagcgtccgcagcgcggccgctaccgccagttccaccagctcggcgccgaggcgctgggctttgccggcccggacgtggatgccgaaatcatcctgatgtgccagcgcctgtgggacgacctgggcctggttggcgtgcgcctggagctcaattcgctggggcaggcccatgaacgcgccgcgcaccgcgaacagctgatcaagtacctggaaggcttccaggacatcctggacgacgacagcaagcgccgcctgtacaccaatccgctgcgcgtgctggacaccaagaacccggcgctgcaggagatggcggcgaacgcgcccaagctgatcgatttcctgggcgaggagtcgctggcgcacttcgagggcgtgcagcgcctgctcaaggccaacaacatcccgttcaagatcaatccgcgcctggtgcgtggcctggactactacaacctgacggtgttcgagtggatcaccgacaagctgggtgcgcagggcaccatcgccggcggcgggcgctatgacccgctgatcgcgcagatgggcggcaagccggcgccggcctgcggctgggccatgggcatcgagcgcatcatcgagctgatccgcgaagagggcgtggtgcccgacgcggcgggctgcgacgtctacctggtgcaccagggcgaagccgccgcgcagcaggcgatgatcgccgcggaacggctgcgcgacgcaggcctggacgtggtgctgcacgccagccccgacggcaagggcggcagcttcaagtcgcagatgaagcgcgccgacacaagcggcgcggcctatgccgttatcattggcgacgacgaagtggctgccggcgtggtccaggtcaaggaacttcgccagcgcgagcaggccgaaggcggtggacaacaggccaccgtgccggccgagggactggtcgattacctgatcgacgccatggtcggcgccagcgaataaatcgcgcaccggccacccggaaaacccagtacacgagtacctaacccaacgcaggtgattgcctcgacatggcttacgatctagaagaacaggaacagcttgagaatctgaaggcctggtggcgccagtacggcaatgcgctgacctgggtgctgatcgtcgcgctgctggcgttcgccggctggaacggctggaagtactgggaacgcaagcaggccggcgaggccgcggtgctgtacgagcaggtgctcaaggccgccgaggcgcgcgacatcgagcgcatcaagcgcgccgcgaccgacctggaagacaagtacggccgcaccgcctatggccagatgagcgcgctggtcgcgggccgcgtgctgtacgatgcgggcgacctcgccgcggccaagagccagctgcaatgggccatcgaccatggcgaccaggagtattcgcacctggcgcgcgtgcgcctggccggcgtgctgctcgacgagaaggcctacgacaagggcctggcgctgctcaaggatgaaccgccggcagcgttcgtggcgctgtatgccgaccgccgcggcgacctgctcgccgcgcaggacaagcgcgacgatgcgcgcacggcctatcgcaaggcgctggacaagctgggccaggaagagccggcgatgcgccagatcatccagttcaagcttgatgcgctgggcacggcctgatccggccgcgcccgaacgcatgcaaacaccgcatatccagcggatcgtataaacaggaccgtaaccctatgacgtcagtgctttcccgtgccgtacatcgccagcccgcccgcgccatgacccgtgcgctggtggcggttgcctgcctggccacactgggcggctgctcgctgttcagcaaggaaaacaagcacccgcccgccgagctcaagccggtctcgggcacgctgtcggtgcgccaggcctggaaggccgacgtgggcaagagcggcccctattcgatgcagccggccgcggcgggcaacaacgtctacgtgtcgtccaataacggcaacgtgatggcgctggaaggcgccagcgggcgcgtgctgtggaagtccaaggccgacctggacctgacctcgggtccgggcagtgatggctcggtgacggcggtcgccggcgagaagggcgccatctatgcctttgacgccagcggcaagcagatctggaagaagcaggtcaacggcgaggtgctgtcggcgccgctggtcggcaatggcctggtggtggtgcgcaccaccgacacgcgcgtattcggcctggacgccgagaccggcgagcgccgctggatctaccagcgttcgcagacgccgctgaacctgcgcgcggcgatggggatggtgtttgccggcgacggcatcgtgatgggcttccccggcggcaagctgggcgtgctgacgccgggcaacggcgtgctgcgctgggagagtgcggtctcgtacccgaagggcgtgtcggagatcgagcgcctgaacgacgtcaccggcctgccgatggtgagcgggcgccaggtctgcgccaccaccttccagggccgggtggcctgcctggaactggccagcgggcagccgcagtggggcaaggatttctcgtcgccgagcggcccggcgcaggatgacaatgcaatttacgccagcgacgagcagtcggtcgtgcatgcgttcgaccgccagaacggcaacgagcgctggaagaacaacgacctgcgcaatcgccgcctgggcgcgccgctggccctgggccgctcggtggtaatgggcgactttgaaggttatgtacacttcctgtcgcgcgaagacggccaggtcatcgcacgcatgaagaccgatggcagtgccatcaccgccgcgcccgtggtggcggggcagaccctggtaatccagacccgcgacggcgacgtctacggtttccagcctggctgacaggaatccaatgcgcgctgccgtacacctgtcggtacggccagcgccgaatccggtagcatgatccttagcgcggcaattgcagcgggtccgttgacccggcgccgcgcccgacaggacaagcggcagaccgcgccctaggtggcgcggcgtgccgtcggatccattgactccggagttaccggggggcggcgtgccggcccccgtttccgtttattgcatgaaaccagttatcgcacttgtcggccgccccaatgtgggcaagtcgacgctatttaaccgcatgacccgatcgcgcgacgcccttgtcgccgacctgccgggcctgacgcgcgaccgccattacggggaagggcgcatcggcgaacgtccgttcatcgccatcgatactggcggcttcgagccggtggtcaaggaaggcatcgtcgccgagatggccaagcagaccaagcaggccgtggtcgaggctgacgtggtgatcttcatcgtcgacggccgcctgggcctggcgccgcaggaccgcgccatcgccgactacctgcgcaagaccggacggcgcatcatgctggcggtcaacaaggccgagggcatgaagtacacctcggtggcggccgacttctatgagctgggcatgggcgatccgtacgcgatctccgctgcccacggcgacggcgtgagcgaactggtcgacgaagccatcgaactcgcggtccaggagcgccccgagctgggcgaagagattccggacgaaggcaagggcgtcaagatcgccatcgtcgggcgccccaatgtggggaaatccacgctggtcaacacgctgatcggcgaagagcgcgtgatcgcgttcgacatgcccggcaccacccgggatgccatctacgtggagttcgagcgcggcggcaagccctacacgctgatcgacacggcaggcttgcgccggcgcggcaaggtgttcgaggcgatcgagaagttctcggtggtcaagacgctgcagtcgatcgccgatgccaatgtggtgatcctgctgctcgatgcgcaacaggatatttccgaccaggacgcgcatatcgccggctttatcgtggaatcgggccgcgcactggtggtgggcgtcaataaatgggatgggctggacggccatacccgcgaccgcatcaagcatgacctggaacgcaagctgcaattccttagcttcgcgaatttccattttgtctcggcacgcgagcgtaccggcattggcgcgctgatgcgttcggtcgatgacgcgttcgccgcggccatggtcaagctgccgacgccgcagctcacgcgtgtgctgcaggaagcggtggaattccagcagcccaagcgggtcggcgcgtcgcggcccaagctgcgctacgcgcaccagggcggctcgaatccgcccattatcgtgatccacggcaatgcgctctcgggcgttgcggaaacctaccggcgctacctggaaaatcgtttccgtacggcattcaagctaaagggcacccctcttcgcatcgaatttcgtacgaacaaaaatccgtacgcggactcgaaggattgagtccggaatcggattcctggcggggcaagttttcgtttgcgttcgtttggaactgcggctaaatttgcggtagcaggggttccctgtgcattgacgccgacttggtaccgtttttgatcttttttctggcgcgtttttgcgccgcctgacttgaaccggggatttccatccccatcattcaccactaaacctataaatttggagtgtgccatgagcaacaaagggcaactgctacaaggcccgttcctgaacgcgctgcgcaaagagcacgtgccggtttccatctacctcgtcaatggcatcaagctgcaaggcaatatcgaatcgttcgaccagtatgtcgtcctgctgcgcaacaccgtgacgcagatggtctacaagcatgcgatttccactgtcgttcctgcgcgcgcggtcaatttccgcgtggatgacgccgccgaggcctgatctccttgcgggcatcgtgcgggcgccccgcggcgccgcaccgatgcccggcgccggtgcgccattgcgcccggtgccgcgcggcctggcggttgccaatgccgccaccgctgccgccacgttccgcatcatgcggcggcctgtcccggcaggggccgggacagtgtccgacatccgcccgccttccccctgaacccgtttttccctgcgctttcgcgcccgcccttggaccccagagccacttcaaataccgccccttcgcgcgccattctggtcggcgtcgacttcggcaagcatgatttccaggaaagcctcagcgaactggcgctgctgacctctaccgctggctctgtgccggtgcatacgttgacgggccgccgctcgcggccggatccggcgctgttcatcggctcgggcaaggccgaggagctgaaggaggccgccgacgcgctggatgccgacgtggtggtgttcaaccacgccctgagcccggcacagcagcgcaacctggagcgcttcctgaaccgccacgtgatcgaccgcaccggcctgatcctggacatcttcgggcagcgcgcgcagagccacgtgggcaaggtgcaggtggagctggcgcaggtccagtaccgcgcgtcgcggctggtccgcgcgtggagccacctggagcggcagaagggcggcatcggcatgcgcggcggccccggcgagcgccagctcgagctggaccggcgcatgctggacgagcgcgccaagcggctcaagtccgatctgtcgcggctgcagcgccagcacagcacgcagcggcgcgcgcgcgcgcgcaatgacacgctcagcatttcgctggtgggctataccaacgcgggcaagtcgacgctgttcaatgcgctgaccaaggctggcgcctatgcggccgaccagctgttcgccacgctcgacaccacctcgcgccgcctgttcctggacgggctgggcaacgtggtgctgtccgacacggtcggctttatccgcgacctgcccacgcaactggtggcggcattccgcgccacgctggacgagaccgtgcatgccgacctgctgctgcatgtggtggatgcatcgagcccggtgcgccacgagcagatcgagcaggtcaaccgcgtgctggcggaaatcaacgcgctggacatcccgcagatcgtggtgatgaacaagatcgatgccgcgcccgagctgctggagcagggcccgcgcctggagcgcgacgaggacggcatccccacccgcgtgttcctgagcgcgcgcgagggcatgggcctggatgcgctgcgcgaggccgtggtcgaggtggcgcaatggctggccagccgcccgcccgagccgcaaccctatgacccgcgcctggccgacgtgccccagtacgccgatgccggcgatgatggcagtgcagatgagggcggcgtggctgacggcagcgacgacgctgatgcgggggattcggacaggctgtagcctgtcaagttgccgtcagttcgccgccagtgctccggccgttctgcccaatcccggtgcgattgctgccgggattgcgcgaattggccaaaagtggctcggatgactgctagaatccccctgttacaaacttccccggacccgtgcacttcatgccccagtttccccggaatgctgattcgagcctgacaccaggcggccgcttcgcgctgcgcgcgggctggcagcgcctgcgcgccatcttctcgctgaacgatccgcgctggggtcgcaacggtcaggacgacgacgacaagaaggacggtcgcgacgacaaccgccagcagaaccagcgcccgcagcaggacggcggcccgcccgacctggacgaactgtggcgcgacttcaaccgccgcctgaacggcctgctcggccgcaaggacaacggcggcggcaacaaccagggctttggcggtccgcgcacgccgggcaagggctcgggggtgggcgctggcgtgatcgtcgcggccgtggtcggcatctggctggccagcggcttcttcatggttcaggaaggccagaccgcggtgatcctgcagttcggcaagttcaagtactccaccggccccggcatcaactggcgcatgccctggccggtccagtcggccgagatcgtcaacctgtcggcggtgcgttcggtcgaggtggggcgctccacctcgatcaaggacagcaacctgaaggactcgtcgatgctgacgcaggacgagaacatcatcgacgtgcgctttaccgtgcagtacgtgatccaggacgccggcgaattcctgttcttcaacaagaccgaccgcggtggcgatgaagagctggtgacgcaggccgccgagacctcggtgcgcgagatcgtcggccgcaacaagatggacgcggtgctgtacgagagccgcgaacagatcgcgcagcaactggccaagtcgatccaggccatcctgacggcgtacaagaccggcatccgcgtgctgtccgtgaacgtgcagagcgtgcagccgcccgagcaggtgcaggccgcgttcgacgacgtcaacaaggccagccaggaccgcgagcgcgcgatcagcgaaggccaggcctatgccaatgacatcctcccgcgcgccaagggtaccgcggcgcgcctgaaggaagagtccgaagcctaccgctcccgcgtggtggcgcaggccgagggcgatgcctcgcgcttccgttcggtgcagaccgaatacgccaaggcgccgcaggtgacgcgcgaccgcatctatctggaaaccatgcagcagatctacaccaattcgaccaaggtgctggtggacgcgcgccagggcaacaatcttctctacctgccgctggacaagctgatggcacaggccgacggccgcgctgcgccgcagccgggccaaccgggtgcggccagcccgccggcgtccgcgccggatgcatcgacggacgcccgctcgcgcgaagcgctgcgcaaccgcgaccgcgactcgcgctgaggagaccgtcatgaaccgactgatttccttcgcgattggctttttcatcctgctggccgtggtttcgtccatgctgttcgtggtcgaccagcgccagtacgccgtggtgttcgccttcggccagatcaagcaggtggtgcgcgagcccggcctgcacttcaagctgccgccgccgttccagaacgtggtgttcatggaccgccgcctgcagaccatcgacgtcgccgccaacgagcgtttcctgaccgccgagaagaagagcatggtggtggactggttcgtcaaatggcgcatcaccgatccgcgcaagttcttcgtggccttcggcggcaacctgcgcggcgcgcaggaccgcatgacccagcgcatcgactcggtggcgcgcgaggagttcggcaagcgcaccgtggccgacgtggtcgccggcgagcgcgagcaggtgatgcaggccatccgcaacggcatggctgaatatgccaagtcggtcggcgtcgagatcctggacgtgcgcctcaagcgcgttgacctgctgcccgcgatcagcgaatcggtgtaccgccgcatggaggccgagcgcaagcgcgtggccaacgaactgcgctcaactggcgccgccgagggcgagaagatccgcgccgatgccgaccgccagcgcgaagtggtgctggccgaggcctaccgcgacgcccaggtgatcaagggccagggcgatgccaaggcctcgcagatctatgccgacgcgtttggccgcgatccgcagttcgcgcagttctggcgcagcatggaggcttaccgcaacaccttccgcgacaagcgcgacgtgctggtgcttgagcccaactccgagttcttccgctacatgcgctccagcggtggtgccgccgcggcggcctcgggcggatccggaggcaagcgctagcaccgtcgcttgtccgtgtggcgaattgacgaaaccccggcttgccggggttttgtccggctggagccatcctcgccgggtgatggcgcgggcgcgtggcgcctgcgatgacgtttctggtcaaggaccggtgccttggggcattgcctcgcgaggtggtccgaatgactgagaagagattgactgagaagagattcactatgtccaaccattggctgctgccagaaaacattgccgacgtgctgccgtcggaagcgcgcaagatcgaagaactgcgccgccgcatgctggacctgttccgcacctacggctatgagctggtgatgccgccgatgctggaatacctggagtcgctgctgaccggcaccggccatgacctggacctgcgcacgctcaagctggtggaccagctgtcgggccgcaccatgggcctgcgtgcagatatcacgccgcaggtggcgcgcatcgacgcgcacctgctgaaccgcccgggcgtgacccgcctgtgctacgcgggcaacgtgctgcatgcgcgcccggcgggcttccacgccacgcgcgagccgatccagatcggcgccgagatctatggccatgccggcctggaagccgacatcgagatccaggacctgatgctggccgcgctgcaggcggcggggttgtccgatgtccgcatcgacatgtgccatgccggcatcctggaagcgctgctggcgggcctgccgtcgatccgcaagatcgaggacgcgctctttgccgcgctggaaaccaaggatgtgccggccctgcgcgaactgaccgtgggtatgccgcagaccgagcgcgatgcgctgctggcgctgccgacgctgtacggcggcgtggacgtgatcgatcgcgcgcgcgcgacgctgccggccagcccggccatcggccgcgcgctggacgaactggcggcactggcggtgcaggtgcgcggagccagcgtgaatatcgacctgtcggatttgcgcggttaccactatcacagtggcgtgatgttcgcggcctatgttgctggcctgcccaattacgtggcgcgcggcggccgttacgacaaggtgggcgaggccttcggccgtgcgcgcccggccacgggtttctcgctggatctgcgagaagtggcggcgctgtcgcccgtggaagtgcgcgcccaggcgatttttgcgccctgggatgcggatccggcactccgggccgcgatttccgcgctgcgcgcggccggcgagatcgtgatccagtcgctgcccggccatacccacgagctcgatgaattcaactgcgaccggcagctggtgcgccaggatgccggctgggccgtggtgccgcgctgacgcttgggcgccgggcgtgcccaaaaatcgagaatcgcccggcaacaagagtagaatacgtttttaacctattgaccaaagcaatatgtccgcatccgcagtaggccagggacgcaatgtcgtcgtgatcggcacccaatggggtgacgaaggcaaaggaaaaatcgtcgattggcttaccgaccaggcacagggtgtggtgcggttccagggtggccacaacgctggccacacgctgatcatcggtggcaagaagaccattctccgcctgatcccgtccgggatcatgcgcgacggcacggtctgctacatcggcaacggtgtggtgctgtcgcccgaagctttgttccgtgaaatcgaagagctcgaaggcgcaggcctgcaggtgcagagccgcctgcgcatttccgaggctgccacgctgatcctgccgtaccacgttgccatcgacaaggcgcgcgaagcgcgccgtggcgccgccaagatcggcaccaccggccgtggcattggcccggcctatgaagacaaggtggcccgccgcgcgctgcgcgtgcaggacctgttcgatccgcagcagttcgccgagcgcctgcgcgagaacctggactaccacaacttcatgctgacccagtacctgggcgccgaagccgtggacttccagcagaccctggacgaagcgctggcctacgcgccgcgcctggcgccgatggtggccgacgtgtcggccgagctgtacgcggtcaatgccgccggcggcaacctgatgttcgaaggcgcgcaaggcacgctgctggacgtggaccacggcacctatccgttcgtgacctcgagcaactgcgtggccggtgctgccgcggcgggcgccggcgtcggcccgggccgcctgaactacatcctgggcatcaccaaggcctactgcacgcgcgtgggcgcgggcccgttcccgagcgagctgtacgacaacgacaacccgtcgcgccaggacccggtcggcgtgcgcctggccaacgtcggcaaggaattcggttcggtcaccggccgtccgcgccgcaccggctggctggatgccgccgcgctcaagcgctcggtgcagatcaacggcgtgtcgggcctgtgcatgaccaagctggacgtgctcgatggcctggaaaccatcaagctgtgcgtgggctacgagctcgacggcaagaccgtcgacatcctgccgcgcggctctgatgccgtggctcgctgcgtgccggtctacgaggaattccccggctggaacgagtcgaccttcggcgtgaagacgtgggacgcgctgcccgagcaggcccgcgtctacctgaagcgcgtggaagaagtggtcggcattccgatcgacatgatctcgaccggcccggaccgcgacgagaccatcctgctgcgtcatccgtacaaggcctgacccggcagcagcccaccaccaggctgcggcgccacgagcgctgcggcccgccagaaataaatcggcccgcgcaagcgggccgagccatatcggtcaaccgacccgacgatacaaagagtaaaacgatgaacctgccaacgaacgatgacgagaacctgtgggtctcctgggacgaataccatcgcctgatcgcacgcctgtcgctgaacgtgcatgagtcgggctggaagttcgacaagatcctgtgcctggcgcgcggcgggctgcgcgtgggcgaccagatgtcgcgcatcttcgacgtgccgctggccatcctggccaccagcagctaccgcgaggccgcgggcacgcagcagggcaacctggacatcgctcagtacatcaccatgacccgcggcgaactgacgggcagggtgctgctggtcgacgacctggtggattcgggcatcacgctggaacgtgtgggccgccacctgaaggaacgctatccggccgtgaccgaggtgcgttcggccgtgctgtggtacaaggcgtgctcgaaggtcgagccggactaccacgtgaccttcctgccgtcgaacccgtggatccaccagccgttcgaagagtacgacacgctgcgcccgcacaacctggccgcctggctcaagcgcggcaagcgcgccagccaggacgacggcgcgcaggcctgatgcgcttgtgccggggcctgccgctacgggcggcccccggcggccggcttaatagccgaccgtgaaacgctggcgcgaatgcgccggcttttcgatctcatcgagcatcgcgatggcatagtcttccatcgagatccagctcttgcctgctgcgtcgctcagcaggttttcctcgccaacgcggaactttccggtacgctcgcccggctcgaacagtgccgacggcgacaggaaggtccagtcgatctgttgttcgccgcgcagcgcgttgaggaagtcgcggcctgcgagggcttcgggcttgtaggcatcggggaagttcggggtgtcgaccaattgcacccccggcgcgacatggaggctgccggcgccacccaccaccagcaggcgcggcacgccggcctggcgcacggccgaggtcacctgctgcgcgttcagctgcgcaaagcgcgcgctgctgatgaccacgtcgttgccggccagggcggcagccagtgcggcgccgtcggcgccgtccacgtccgcggtggtcacgccgtcgcgtgcgggcagtttgctggcctggcgcgcaatggcggtcacctggtggccgcggcgcagggcttcgtcggtcaggcgcgtgccaacacggccggtggcgccgatgattgcgatcttcatggtcactccttctttcggtcaggttgatatgaaaccattgtggttacatatcggggcaaaaaaattcagcgcttgcggcgctggctgttgccttcgacatcggcgagcatgctggcgatggtggcgccggcaagggtatcgtccatggccgcctgcgcacggtccgcgaccttgcgcagcgcaccggtgatctcgcgcccgaccgggcaggccgggttgggcgcgctctggtgcagcgtgatcagcgcggtggtttccaccacgcggaacacgtcgagcagcgtgattgacgcagccgggcgcgccagcgtggcgccgccggtgctgcccatggtggtcgccaccagcccggcttcagccagttgaccgaccagccgccggatcagcgccgggttggtgcccacgctggcggcgatcagcgacgagggcaccggctcggccgaactggcgagcagggtaaggatgtggactgccacggcgaaccggctgcttgtgctcaacgcttgtgctcgggatgtcaggtgcaatgtgaaaccatgatagttacacatggtcgggcatgtcaagcacggacaggagcgcaaggagggcggagtaccgggagggaaggaggtaatacgccgatgtggcagccaatggccggtggaatgccggaatcgccactgaagctgttacactcctcgacattgccgtaccgttgtggttcggctgtcgcgcggggtacggtgcgcggtttcacggacgggaaaaaacccgtacgctcgcaggtatgacatcgcggcatggccgccaagcaaggagtgcaagttgccggatctgatgcgcgaaacaggcgtcaaaaacaaaaaacccgcagggctcgaaagcgctgcgggtttttccggtaacttggtgcccaggagaggactcgaacctccacagtgttgccaccgctaggacctgaacctagtgcgtctaccaattccgccacctgggcaggtgtcgaaacaaccgaagcgctcattatagagagcgcgagaattttgtcaaatagtttccagaaaaaattgaatcagaacaactatccgatccccagccgggaagaaatcctgggcgtgctgagaacgtcgggatccccccagtcggccggcgatattgccaaggccctctccgtcacgcgcaaagagcatgacggtttccagaagcgcctggcggccatggagcgcgacggccagatcgagctgaaccgcaagggccgctatgagcttgcccatcagccgaacttcgtcaccggccgggtgcaaggtcaccgcgacggcttcggcttcctgatccgcgacgacggcgaagacgacatcttcctgcccgagcgcgagctgcagaaggccatgcacaacgaccgcgcgcaggtgcgcgtggtgggctacgaccggcgcgggcgccctgaagggcagatcgtcgagatcatcgagcgcgccaaccgttttgtcatcggccgtctgctcagtgaaggcggcgtgctggtggtggcgcctgaagacaagcgcatcagccaggacatcctgatcccgcccaaggcgcagggcaaggcacgggtggggcaggtggtcagcgtcgagctgatcgaattccccgaccgctacgtgcagccggtgggccgcgtggtggaggtgctgggcgaaatcgacgatcccggcatggagatcgagatcgccgtgcgcaagtacggcgtgccacatgcgttctcgccggccgctgcccaggaagcctccgcgctgcccgacgaggtgcgccaggccgacctggaccaccgcatcgacctgcgcgacatcccgctggtgaccatcgacggcgaagacgcacgcgacttcgacgatgcggtctattgcgagccggtcaagatcggccgcgccaagggctggcgcctgatcgtggcgatcgccgacgtgtcgcactatgtgcgccccggcaccccgctggatgcggatgcgctggaccgggccacttcggtctacttcccgcgccgcgtgatcccgatgctgccggagaagctgtccaacgggctgtgctcgctcaatccgcacgtggaccggctgtgcatggtgtgcgatgccgtgatcaccgccaagggcgagctcaagggctaccagttctacccggccgtgatgcattcgaccgcgcgcctgacctacaacgaggtctggtcggtgctgtccaacaccaagggccccgaggcgcacaagcgcggcgagctggtgccgcacctgcagaacctgtatgagttgttccaggtcctgctcaaggcacggcgcgcgcgcggcgcgatcgacttcgacaccaccgagacctatatcgtctgcaacgcgcagggcaagatcgagcagatcctgccgcgcacgcgcaacgatgcgcaccggctgatcgaggagtgcatgctgaccgccaacgtctgcgcggccgacttcctcgaacgcttcaagcacccggcgctgtaccgcatccacgcgggccccagcgaagagaagctgaagaacctgcgcgacttcctgcgcaccgccggcctgtcgctgggcggcggcgacaagccgcaggcatcggactacgccgaggtgatggacaagatcaagtcccgtcccgacgcgccgatgctgcagaccatgctgctgcgctcgatgcagcaggcggtgtacagcccggacaatatcggccacttcggcctgtcgtacgaggcctacgcgcacttcaccagcccgatccgccgctaccccgacctgctggtgcaccgcgcgatcaaggcggtgctggcacataccaagtaccagccggcgtttgcgcacgggaccgagctgaataccgcgatctcgcccaaggcgcgccggctgcaggccaaggacgccgagcagaaggcagaactgaccgcggcgcgcgccaggcgcaacgaggccatctgggacgagcttggcctgcactgctcggccaatgagcgccgcgcggacgaggcttcgcgcgatgtcgaggcctggctcaagtgctacttcatgcgcgacaagctgggcagcgactacgccggcaccgtcagcgccgtgacctcgttcggcatcttcgtgcagctcgacgagctgtacgtggaaggcctggtccacgtgaccgagctgggcagcgactacttccagtacgacgaggcccgcaacgaactgcgcggcgagcgcaccggcatccgctaccgcctgaccgaccgcgtgcgcgtgcaggtatcgcgcgtggacctggatgcgcgcaagatcgacttccgcctggtgcaggagccgtcggcgaaaaccctgcgcgcccgcgcggggggcaccgagacccagccgcgcgtgcccgccgcccatgcggtgccagcacgcaagaagggccgccagctggcggcgctgctgggcggctcgtccaagccggaagagtcgttcgacgagacgctggaccgcgtgatcgaggagcagccggtgttcgaggccgtgatcacgccgctcaggccgcacgtgaagaccggcggcaagccggccaagcgcgcggccaagcccaagcccgcgcacctggagaagccgcacaagccggcctccaagtcgcaccaggccaagcccgcgggcaagacgccggccaagagcccgcgcaccccgcgcaagcgctgaagcttgcgggggctgccatgccgccgcctctcgcccccggcctgctgccgggggcgagagggcgagtacaatcgcgccatggctaaaaacaaactcctgatcggctttcacgccgtcaccgcacgcctgcgccaagatgccaagggcgtgaccgatgtctatatcgaatccgcgcgccgcgaccggcgcatgcaggacttcgtgcgcctggccgaaagcctgggcgtgcgcctgcatccggtcgatgccgagcgcctgcgcggcatggccggcaccgaccgccaccagggcgtggtggcacgtgccgaagacgtggcactggcgctgaacctggatgaactgctcgacggcatcgaaggcacgccgctgctgctggtgctggacggcgtcaccgacccccacaacctgggtgcctgcctgcgcgtggccgacggcgccggcgcgcatgccgtgatcgcccccaaggaccgcagcgtcggcctcaatgccaccgtggccaaggtcgccagcggcgccgccgagaccgtgccctatatcaccgtcaccaacctggcccgcaccctgcgtgagctgcaggaacgcggcatctgggtcatcggcaccgccgacggcaccgaaaaatcgctgtatgacatcgacttcaaggggccgaccgcgatcgtgatgggcgccgagggcgagggcatgcgccgcctgacgcgcgagacctgcgacgagctggtcggcatcccgatggcgggcggtgtggaaagcctgaacgtctcggtcgccagcggcgtatgcctgtacgaagccgtgcgccagcggcgcctgccgcgataagtccatggccgctgattacggtctccttgacatgccggggcttgaggaagcacgccggctgatcgcggccgccggcaatatcttcgtgctgaccggcgccggcatttccgccgaatccggcgtgccgaccttccgcgacgcgatgaccgggctgtggcagcagttcgacccggaagagctggccagcgaggacgcctaccgccgccagccggcgctggtctgggagtggtacctgcatcggcgcgagctggtcgcagccgtgcatcccaacccggcgcaccatgcgctggtcgcgctggctgcgcagagacctttcacgctggtcacgcagaacgtggacggcctgcaccagcgcgccggcagcgcgggcgtgatcgaactgcatggcaacctgttcgccaacaaatggctggacgggtgcggacgctgcaacgaggcgaccgcgctgcccggcatgccgccgcgctgcaacctgtgcggcgcgctgatgcgtccgggcgtggtgtggttcggcgaggacctgccgcgcgtggcgcgctaccgcgccgagcatgcggcgcagcactgcgacctgtgcctggtggtcggcacctcggggctggtctatccggcggcggggctgccgggcctggcgcgcgagcatggcgcgccggtgatcgtggtcaatccgcagccgtcggcgctggaccagaccgcggatatcgtgctgtccgccgcggcgggggcatgtctgccattgctgtggccgccgcagccggcgccctcggccggctgagcctggatccgggcgttgccgcccggaccatccttacttcgcaatctcgccgatcagcttctccagcttgaccgcatccgccgcaaacaggcggatgccttcggccagcttctcggtcgccatcgcatcctcattcaactgccagcggaaggccggctcgtcggccgcgatgcgggcgatattggcggcctgggcctggtccaccgacagcttgtgcgccaccgggccctggccggccgcgagctgctcgagcagctcggggctgatggtgagcaggtcgcagccggccagcgacaggatctgcgtggtgctgcggaagctggcgcccatcacctcggtcgggtagccgaacttcttgtagtagtcgtagatctggcgcaccgagcgcacgccggggtcgttgtcgccgccattggcggccgcgtcccattgctcgccggcctgcttcttgtaccagtcgaagatgcggccgacgaagggcgagatcagctgcgcgccggcctcggcgcacgccaccgcctgcaccagcgagaacagcagcgtcatgttgcagcggatgccgtcgcgctgcaggatctcggctgcgcggatgccttcccaggtggaggcaatcttgatcagcacgcgttcgcgcgcaatgccgcgctgctcatacagctggatcaggtggcgcgccttggccacgctggcctcggtgtcgaaggacaggcgcgcatcgacttcggtcgagacgcggcctggcacgatcgccaggatctcgcagccgaaggcgatcagcacttcgtccatcaccgcatcgacgccgccgttgccgtggtggtcctgtaccgccttctccagcaggtgccggtattcgggcttttgcacggccttcaggatcagcgacggattggtggtcgcgtcctgcggggtgtactgcttcatcagctggaagtcgccggtatcggccactaccgtggtgaactgcctgagttgttcgagctggttcatggtcgcttggtcgtctgcttgtgcgtctgcaaaatcgttcgcgggcatcaggggtgcgcgtacggcacccggtccggtccattgtaccgtcgcccgcgtgacctgccgccgcaatccgctacactacgcgtttcccccaacgcaatctggctgttgtcatgactcaggatgaactcaaggcgctggtcgcgcaagctgccgccgactacgtgaagcaggaagtgcccgaaggggcagtgctcggggtgggcactggctccactgccaatctcttcattgacgccgtggcggcattcaaggagcgcttcgccggtgcggtgtcgagctccgaggcctccacgcgccgcctgcagcagcacggcttcaaggtgctggacctgaacgaagtcgacgagatcccggtgtatgtcgacggcgccgacgagatcgacgccagcggcgccatgatcaagggcggcggcggggcgctcacgcgcgagaagatcgtggcttcggtcgcgaagcgctttgtctgcatcgccgacggcagcaagctggtccagaccatgggcaccttcccgctgccggtcgaggtgattccgatggcacgtgcagcggtggcgcgcaagctgcaggccctgggtggccagccgcgtctgcgcatgaccaaggaaggcggcatctacaagaccgacaacggcaatgtgatcctggacgtggccggcctgaagatcgacgatccgcgcggcctggaacaggccgtcaaccaggtgccgggcgtggtcacggtgggcctgttcgcgttgcgcggcgcggatgtgttgctgctgggcaccggcgacggcgtgcagcgcactgactactgagcaaagtcgtccgctgccaagcaaaaaggggtgcctgaggcaccccttttgtcattggccggtccggttcaggactgcggcggcacgtagccctgcgcctggtcggcgccctcgccgaagaagtacttctcggtctgcttgagcaggtactggcgcgcgcgcgcatcggccatgttcaggcggttttcgttgatcagcatggtctggtgcttgagccagccagcccaggcttccttcgacacgctttgccagatcttcttgcccagttcgccgggcagcggcgggaagtcgaggccttcggcttccttgttcagcttgatgcattggaccatgcgggccatggggactccttggtatgttcgttagagcttcggcgctggcgctattgtagccaagcggggcaccgggccgcggcgctgcggcgattgcccctacggcttcagagctttttcatcagcaccatggacttgcgctgccagttgtagagcttgcgcttgtcctcgggcaggtcgtcgacgttggcgtggacgaaaccgcgcttcaggaaccagtgttcggtccgggtggtgagcacgaacagcttctccaggccgagcgcgcgggcgcggcgctcgatgcgcttgagcaggcgctcgccgtcgccggtgccctgggcttcctgcgataccgtcaggcaggccatctcgcccatgttctcgcgcgggtagtcgtagagcgccgcgcagccgaacagcacgccgtcgtgctcgatcaccgagaagttggagatatcgcgctcgatcaggtggcgtccgcgcggcaccagcgtgccatcctgctccagcggggcgatcagctggacgatgccgccgacgtcgtcgagcgtggcttcgcgcaggctttccaggtcggtgtcggacagcatggtgccgacgccgtcgtgcaggaacagttccagcagcaccgcaccgtcgagcgaataggggatcaggtgcgcacgcggcacaccgcccttgagcgccttgaccaggtgctgcaggtagttggccacgtccggcggcagatggttgttttgcaggcgctccacggcggtgcgcagggacatttcctgcatcatcttgccgaccggatcgggcacgcccggcacctcggtgatgaagatcagcttgtcggccttgagcgccgtggcggtggcgctggccacgtcttccatcgacaggttgaaggcctggccggtgggcgagaagcccagcggcgacagcagcaccaccttgccgtgcgacagcgacatgcgcacggactcggcgtcgatcttgcgcaccaggccggtgtgctggtagtcggtgccgttgacgatgccgaccgggcgggcagtcacgaagttgccggagatcaccgacagctgggcgccggccatcggcgtattgggcaggccctggctgaaggcggcctcgatgtccaggcgcagttcgccggcggcttccttggcgcattcgagcgcggcgttgtcggtgacgcgcacgccatcgacgaactgtgactcgacatggcgcagcgccagctgttcttccacctgcgggcgcgagccgtgcaccagcacgatctgcatgcccatggcgtgcagcagcgcgacgtcgttgaccagcgcattgagcacgcccgacttgaccagttctccggcgaaggcgatcacaaaggtcttgccgcggaaggcatggatatacggcgccaccatgcgcagccagtcgacgaactgctggtggtcggggccgctgcgctcgggctcggccgccgtgggcgccggggcggcgggcacgggggaggtcggggcaggcgcggggaattcagccgcgggcggctgcgccggcacgggggcggcgggtgaggaggcaggcgccgtctgcggcgcgtcggttctggcgttcatcccgcggattataatcccggccaatgtcagaacaacgccccgtcaagcctaaaccacccgccgcgccgcgccagcgcgccggtgccgctcagccagcctccccaacccagccccggccggccccaggcccggccaggaagccggacgtccgtgcgcagccagccgctgcccggccggccggtgaagccgggcagcgcccgccacgcggtccccgcgaggcgcgtgcgccgcgtgcgccaaggccggtcaacccgctgccgcccatcaccttcccggaggccctgccggtctccggccgccgcgacgagatcgccgcggcgctgctggccaaccaagtggtgatcgtctcgggcgagaccggctcgggcaagaccacccagctgcccaagatctgcctgtcgatcgggcgcggcccggggcgcgagggtggggggctgatcggccacacccagccgcggcgcatcgccgccacctcgaccgccaaacgcattgcgcaggagatcggcacgccgctgggcgagcacgtgggctaccaggtgcgtttcaacgacaccatgtcgtcgggggcgtcggtcaagctgatgaccgacggcatcctgctggccgagactcagaacgatccgctgctgcgcgcctacgacacgctgatcatcgatgaggcgcacgagcgcagcctgaacatcgacttcctgatcggctacctgcgccagatcctgccgaagcgcccggacctgaaggtgatcatcacctcggccaccatcgatgcccagcgctttgcccagcatttcgcctcgggcgacaagccggcgccggtgatcgaggtcagcggccgcctgtacccggtggaagtgcgctaccgtccgatcaccgaggacgtgcccgcgggcgcgccgcgcagcccgcaggcgcgcgagcgcgacctgtacgacggcattgtcgaggcggtcgacgaggtgtgccgcgtcggcccgggcgatgtgctggtgttcctgcccggcgagcgcgagatccgcgaagccgccgaggcgctgcgcaagcaccacccgccgcataccgagatcctgccgctgtttgcgcggctgtcggtgcaggagcaggagcgggtgttcaagccgtccaacgcgcggcgcatcgtgctggcgaccaacgtcgccgaaacctcgctgacggtgccgggcatccgctacgtggtcgataccgggctggcgcgggtcaagcgctactcgtaccgcaacaaggtcgagcaactgcaggtcgagtcgatctcgcaggccgctgccaaccagcgcgctggccgttgcggccgggttgccaacggcgtgtgcatccggctgtatgaggagtccgatttcgccggccggccgcgctttaccgaccccgagatcctgcgctcgtcgctggccgcggtgatcctgcgcatgaaggcgctgcggctgaccgagatcgagtcgttcccgtttatcgagccgccgctgggccgcgccgttgccgacggctaccagctgctgcaggaactgggcgcggtcgacgacgccaaccagcttaccggcaccgggcgccagctggccaagctgccgctggacccgcgcgtggcgcgcatgatcctggccgcgcgcgagcatcactgcctgcgcgaggtgctggtcatcgccagcgcgctgtcggtgcaggacccgcgcgaccgcccgcaggaggcgcaggaagccgccgaccaggcgcaccgcaagttcatggacgagaagtccgagttcctgggctgggtcaggctgtggaagtggttcgaggacgcggtcgcgcacaagaagtccaaccgccagctgcaggaccagtgccgcgcccacttcctgtcgcacctgcggctgcgcgagtggcgcgacgtgcattcgcaactgctgaccacggtgaccgagcagggctggcgcctgaacgacagcgagcccacctatgagcaggtgcacaaggcgctgctgaccggcctgctgggcaatgtcggctgccgcatcgaggatggcgacggcaagggccgcgaatacctgggcgcgcgcggcatcaagttccacctgtggccgggctcgctgatcgcgcgcaaggtcgggcgctggatcgtcgcggccgagctggtcgagaccagccggctgttcgcgcgcacgctggcgcgcatcgagccggagtggctggaacaggtgggccgtcacctgctcaaggtcagctggagcgatccgcactgggaaaagaaggcgggccaggtgctggcgctggagcgcgccacgctgtacgggctggtggtctaccagcaccggcgcgtgcactacggcccgatgaacccgcaggaagcgcgcgagatctttatccgccgtgcgctggtcgagggcgagttcgacacgcgcctgccgttctacgcgcacaaccagcgcctggtgcgcgagatcgagaacctggagcacaagtcgcgccgccaggacgtgctggtcgacgacgaactgatctacgccttctacgatcgcgcgattcccgccgacatctgccagcaggccagcttcgagcagtggtaccaggcagagagcggcaaggaccgcaagctgctgtacctgaaccgcgacgagctgatgcggcacgaggcggccggcatcaccaccgacctgttccccaaggccatgaacgtggccggggtggacatggggctgacctaccacttcgagccaggcagccaccgcgacggcgtgaccctgaccgtgccgctgtacgcactcaaccaggtgcgccaggagcgtgccgactggctggtgccgggcatgatcaaggagaaggtgcacctgctgctcaagtcgctgccgcagaagctgcgccgccactgcgtgccgctgccggaatatgccgcggcctttgtcgcgcgccagccgcttggcgagggcgagctgctggacgtgctgattgccgatatccgcgagcagaccggcaccatggtcaagcgcgccgacttcaagctggaaacgctgcccgcgcaccatacgatgaacttcaaggtggtcgacgagcacggccgccagcttgagatgggccgcaacctggcccagctgcgcgccgagctgggcgggcaggcgcagcagtcgttccagcgggtggccgcgcaagccgcggcacaggcggcaacccaggccccggagcaggcggcgccgctggccgcggccgagcccggcaagtacgagggactgaccggctggaccttcggtgagctgcccgagctgctggagatccgcaagggcagccagaccctgttcggctaccccgcgctggtcgatcgcggcacgcactgcgacgtggaagtcttcgacgacccgcaggaagccgcccgcgtccaccacctggggctgcgccggctgtttgcgctgcagctgcgcgagcaggtcaagttcatcgagaagaacatcccgggcctgcagcagatggcgatgcagtacatgacgctgggcacgcaggagatgctgcgcgaacaggtcgtgatgctggcgctggagcgtgcctgcatgcaggcgccgctgccgcgcaacgaggccgagttcaatgcacgcaaggatgagggccgcacccggctgtcgctgctggcgcaggagatcgcgcggctggtggggaccatcctggccgagtacgccggactgccgcgcaagctgctgcaggccaagccgttcgccgggccccatgcggacatggaagcgcagctcgggcggctgatgggcaagcgctttgtcgacgagaccccatacacgcaactggtccatttcccgcgctacctgaagggcatcgccatgcgggtggacaagctcaagggcgacccggcgcgcgacacccagcgcacgcaggagatggcgccgctggtgcagcagtggcagcgggccgaaaagcagctgcgcactcagggccgcggcggcgaggacgcgcggctggaggaattccgctggatgctggaggagctgcgcatcgcgctgttcgcccaggagctgcgcacaccggtgccgatgtcggtcaagcggctgcagaaagtgtgggaatcgatgcagcgctgagcgccggcgcggggcgcaatgccggggcgaaccgcaaatggtcgctccggcgcaacaatctgccaaaatcttgatcgagttcggccgcggcgtcagcggattttcgtgctcaaccgttagaatcgccggttcagtcttcttctggcgggtcttatgtttgcgctgcggttcgcattgcgtcgtgttgtagctggtggtttcacggtgggcgccctggcgctgggcctgctggccgcaccggcatcggcggaagtggtggtgatcctgaattcaggtgatgcaaccgtcacgctaatcgacaagaatacccagaaggtgctggagaccttcccgatcggcaaggaaccgcaccacctgatcgcaacgccggacgacaagtcgctgatcgttgccaacgcggtcggcaacgacctggtgttcctggacccggtctcgggcaaggtccagcagcgcgtgcccaatgtcgacgacccgtaccagatcggcttctcgccggaccagaagtggtttgtcgccaccggcaaccggctcgaccgtgtcgacctctaccgctgggacggcaaggcgctgaagctggccaaacagttcccgctggccaagacccccagccatatcgcctttaccgccgacagccgcatcgccttcatcacgctgcaggactccaatgaggtggcagccatcgacctggtcacgcagaacgtgatgtggcgcatggaaaccggctcggcgccggcgggcatctgggtcacgccggaccagaaatacctgctggtcggcatgaccggggctgattacgtggccgtgatcgactggcgcacgcgcacggtggtcaagcagatccagaccggcaagggcgcgcacaacttccgcgcggtcggcgacaagcgccacctgttcctcagcaaccgggtcacgagcagcatcagcatcatcgaccagcagacgctggccaaggtcggcgacatcaccggcctgccgccgggcccggacgacatggagctgaccgccgacggcaagacgctgtgggtcaccttccgctgggcgcgctcggtcggcctggtcgacgtggccagccgcaagctggtcaagaccgtgcgcgtcgggcgctcgccgcacggcatctatttccgcactcgcgcgccgctgtattgaccgggcagggcagggaccatggacgataccagggcatcgcgatccggacggctgggcaggctgctggctgcgctggcgcttgcctgcgtcctgccgtcggcgctgcaggcggctgacgtgcccaagcctggcgccaaggcgtgcccggccggcacgctttacctgaccttcgacaccggcagcatgagccaggcgcagttgatcgccgatacgctgcgccgccaccatatccgcgccaccttcttcctggccaatgagccgaccgtgcgccaggacagttcgctggacccatcctgggcgccgtactggaagtcactggtggccgacggccacgcctttggcacgcataccttcgaccatgtctacctgcgcagcgtgcacgccgggcatgtgaccatgaggccgcagttcggcacgcaggcgggcaaggacatggtcatggacgcggccggattctgccaggagctgcggcgcagcgccgacgccttccacggcatgaccggcgccgccatggtgccgctgtggcgcgccccgggcgggcgcaccgccccgcagacggtgcaatgggccgagcagtgcggcttccgccacgtcggctgggcgccggccgggttcctgggcgacgagctgtcgtccgaccgctatcccaacgcggcgctgctggaacgcgcgctggccaacctgcgcgacggcgatatcaccatggcgcacctgggcatctggtcgcgcaaggatccgtgggcgcccggcgtgctggagccgctgctcgccggccttgagcgcaagggattctgtttcgcgacgctgcgcgagcacccggcctaccgcgactggatcgccaggccgcagccagtcgggcaaaaggagggcaggcgctgatgtgggagacgctgaacggctggatcggccaggtcgagggcacgctgttccaggacgtggtgctgcccgtggtctacgacctcgggtttggccgctatgccgaggaagccttcaccggcaccgagtggctgctggtgggcctggtgcagatcgtggtgatggcattgatcctggggccgctggagaaatggcgcccggtcgagccggtatccgaccgcgccggcatccgcaccgatatcttctacacggtgatccaccggctcgggctgttccggctggccatgttcttcctgctcgcgccgctgaccgacgccctggaaggcgacctgcggctgatgggctggcaccgcatcaatgtggaagactggtggccgggcgtgacctcggtgccgctggtcagcttctttgtctacctgctgctgttcgacttcctcgactactggtaccaccggctgtcgcattcgttccgctggtggtggcatctgcatgcggtgcaccacagccagcgccagatgacgctgtggagcgacaaccgcaaccacctgctggacgacatgctgcgcgatctggtgttcgcgctggtggcgctgggcgtgggcgtggagccgtcgcagtacgtgctgctggtggcgttgtcgcagttgctgcagagcctgcagcatgccaacgtgcgactgcacttcggcgccatcggcgagcggctgctgatctcgccgcgctttcatcgcacccaccacgccgtgggcatcggccatgaggccgacggcgcaccggccaagctgggcggctgcaactacggcgtgatcttcccgtggtgggacatgctgctcggcaccgcggtcttcaccgagacctaccacccgaccggcatccgcgaccagctgccgccgccgctgggcaagggccacgactacggcgcgggcttcctggcgcaccagtggtacggcatcaagcggctgctgcggctgcgctgaaacggcgggtctggaggtagtcctccacccgcggcgcaacacggcgcgccgcggcggcaagcggcgtatgctagtgttccgggttgccgccggtccggcccagtcggacttctgccgcgcccggcgcctttcctcctgtctgccttcgactgcatgaacgatatcttccgctcgtttggccgcgcgctggtcagccagctgcatccccgcatgctgatgctgaccgtgctgcctttcgtcctggccacgctgctgtggggcggtctgctctggtggggctgggaccccatcatgggcgccacgcgcagcttcctggagacctccatcctgaccagctggatctacagcgcgctcgactggttcggcctgcaatcgatgcgcaccatcgtggcgccgctgttcgtggcggcactggcaatcccgctggtgattgcctcgatgctgatgtttatcggcgtgttctcggtgccggcggtggtgcgccacctggagcgcagctacccggacctggccaaggcccatggcggcagcatcctgggcagcgtgttccagtcgctgggcagcacgctggtgttcctggtgctggtgctggtgacgctgccgctgtggctgatcccgccgttctttgcgctgatcccgccggtgctgtggggctggctgacctaccgcgtgatgacgtatgacgcgctcgccgaccacgccagcgccgaagagcgcaagacgctggtgcgccgccaccgcacgccgctgctggtgatcggggtggcggtggggctgctgggctcggcgccgacgctgctgtgggtgtcgtcggcggcggtgatcttcctgtttccgttcgtgctggccggcacgctgtggctgtatgtgctgatctttatcttctcggcgctgtggttcggccacttctgcctgcgcgcgctggcgcagctgcgggccgagcgcgcggcggtgccggcccagccgccggcgcatcagccggaccagccggcgcttgacggcgacgtcatcgacctggcgccgagcgacgtgcgccgcatcgaaaattcctgaagcgagggcaatatgggttttggcctgatcgtcattggcgacgagatcctgtcggggcggcgtgaagacaagcatctgcgccgcaccatcgaactgctgggcgcgcgcgggctggcgctggactgggccgaatacgtcggcgatgaccgagcccgcatcaccgccacgctgcggcgcacgctggccggcccggacgtggtgttctgcaccggcggcatcggcgccacgccggacgatcacacccgccagtgcgtggccgccgcgctgggcgtgccgctggtgctgcatcccgaggcgcgcgaactgattgcgctgcgcattgccgagaccgcgggcggcgacccggtcaaggccgacctgaatcagccggaaaaccagcaccgcttcaaaatgggcgagttccccaagggcgcgcgcatcattcccaacagctacaaccgcatcccgggcttttcggtcggtcaccaccacttcatgccgggattcccggtgatggcatggccgatgatggaatgggtgctggaccacgactatgcgcacctgttccaccaggtgcagcagcaggagcgggccttctacgtgttcgaggcgccggagtccacgctgacgccgctgatggagaaggtcgaagcggcgcatccgggcatccgcgtgttcagcctgccctcggtcggcgacgtgcagcgcggcgaccgcttcgcgcgccgccatatcgacctgggggtcaagggcccggccgatctgctggcaccggcctatgcgatgctgctcgcaggcgtgcaggcgatggggttcgagatcgtggagcagccgccgcgcgaagcggcgcaggcttaaggcggcacgggtcgcaagaagaaggggcagccttggctgccccttctctcattctggcccgaccgcgatcaggcgccgtgccacggcagtccgcgcacgcaccagccttcaacagtcttgcggtggtggtggtcgtcgcggttgccctcgaagccttccagcacgtccatggcgaagtggtagccggcttcggtggccacgcgcgcggcgtgcttggagcgcgccgcgctgcggcacaggaacagcaccggcacgtcggccggaacgcgtgccctcagctcttcgacaaagcgggcattctgcgcaccgcccggataggacatccattcgacatgggcgaactgcgcatccggcacgtcaacgccgccgacccagtccagttcggcctgggtgcgcacgtcgaccagcacggcggaaggatcgttctgcagcagcgcaaaggcttcctgcggcgacagcgcgccaaaatacgggagctggttctgttgctggcgctggcgggcggcctggaggagatcgtctcgggtggtcatctgcgtgacaaatttgaggaatggaattggaggcggcaaagccgcaacgcactattctatagcgccgggccgattcgaagcctcattgactgctgttggggcgtcgggtgactccttttggtgcatccgcactgttcaagtgcgacgccttgctgaatgcaccattgtggtgttttattagggggcgctacgccgaaatgcgtgtaaccggtgcgccactcggcagccgagccgctgcttcgcttacgccgccgcggtgcgcggttcgccgacgttgcacttttttcgggctgccggtggcggtggggcgttcgcatggcacgctttctgctaacattcttcgtcctttcgtggctggtcgggacggcgcggcagagcatgcatcggcgccggtgacgacaggcccaagaattggctttctcagacttccgccgaatatccaggagattggcatggcccacagcgttgcagacgtgatgaagctggtgaaggaaaacgacgtcaagttcgtcgatttccgtttcaccgataccaaaggcaaggagcaacacgtgtccgtgcccgtgtcgcacttcgatgaagacaagttcgaaagcggccacgccttcgacggttcgtcgatcgccggctggaagggtatcgaagcttcagacatgctgctgatgccggattcgaacaccgcccacatcgacccgttctacgaagagccgacgctggtgctgtcctgcgacgtggtcgagccgtcggacggcaagggctatgaccgcgacccgcgttccatcgccaagcgcgccgaagcctacctgaagagcaccggcctgggcgacaccgctttctttggtccggagcccgagttcttcatcttcgacggcgtgacctggaacgtcgacatgcaaggctgcttcgtgaagatccattccgaagaagccccgtggtcgtcggccaaggaattcgagcacggcaacagcggccaccgtccgggcaagaagggcggctacttcccggtcgccccgatcgacaccttccaggacatgcgttcggaaatgtgcctgatcctggaatcgctgggcatccccgttgaagtccaccaccacgaagtggctggccagggccagaacgaaatcggcacccgcttcagcacgctggtgcagcgcgccgactggacccagatgcagaagtacgtgatccagaacgtcgcccacacctacggcaagaccgccaccttcatgccgaagccgatcgttggcgacaacggttcgggcatgcacgtgcaccagtccgtgtggaaggacggccagaacctgttcgcgggcaacggctacgccggcctgtcggaattcgcgctgtactacatcggcggcatcatcaagcacgcccgtgccctgaatgccatcaccaacccgggcacgaactcgtacaagcgcctggtgccgggcttcgaagctccggtgaagctggcctactcggcccgcaaccgctcggcttcgatccgcatcccgtatgtggccaacccgaagggccgccgcatcgagacccgcttcccggatccgctgatgaacccgtacctgggcttctcggcgctgctgatggccggcctggatggcgtgatgaacaagatccacccgggcgaagctgccgacaagaacctgtacgacctgccgccggaagaggatgcaaagatcccgaccgtgtgctcgagcctggaccaggcgctggagtacctggacaacgaccgcgagttcctgacccgcggcggcgtgttctcgaactcgatgatcgatgcctacatcgaactgaagatggaagaagtcacgcgtttccgcatgaccacgcacccggtcgagttcgaaatgtactactcgctgtaagcggcctttgcccgggaatgacgcaggttgtggccgggcaacagttgcaccagaaaggggcggcttcggctgtccctttttgctttgctcgctagaatggggaatcgtgttccatcccgttcaagcctaacgccatgttcatggacgcctcttcacgcacggcccgccggaccctgaccttgccccgatctctgcaccaatttcgtctcggattccctgttctggtgagtgctgtggcgctgacgctgggcgcgtgggccgggcagtcttccgcgcagtcctcggacgtctatgtctgcaccgggcccaatggcgtgcccgagtatcgcaatggcaacgcgggcaagggctgcaagaagctgaacctgccggaggtggtgacggtcccgggcgggcgtaccgctgcgccggccaagggcgctggcagcaccgccggcgcggcggctggcggcaccagcttcccgcgcgtggacagtgccacgcagaagagccgcgacggtgagcgccgcgcggtgctctcgcaggagctgcaggccgaagaggccaagctgcaggcgctgcgtgccgagtacaacaacggccagccggagcgccagggcaatgagcgcaactatcagaaatacctcgatcgcacggcagcgctgcgcgacgacatcgcccgcagcgaggccaatgcggcgtcgctgcggcgcgagcttggcaatttgaaggactagtcttatgcgtcgcctgattcgcggagtgtcgcgcaaggccagcggtgccgacggcgcccgtggcgaatcgccggcggctgatgcggcgccggccgaaggcagcgcccaggtgctgaccatgggcgccgtggcgttccatgccggcctggacgtagtggccaacccggtgctgctggtgcagcagccggggctgcgcgtcgtctttgcgaacccggccgctgaagccaccttcggcgtgtcgcgcaagggcatggtggagctgacgctgcctgacctgttcgggcgttccgatgagctgcacagcatgatcgacaccgtggtcacgcggcagttcgacgtgcgccggcaggacctgatcctgcacccgccgctgcaggagccggcccatgtgcacgtggtgatctccgcgctggaagcggtcggcgacaccgtggtggtggaaatcctgcccaatgaacagaaggtgcgcagcgaacgcgaagaacgcatcctggacctgacctcggccaacaaggaactgatccgcaacctggcccacgaaatcaagaacccgctgggcggcattcgcggcgcggcgcagctgctggagttcgagctgccggagcgctcgctgcgcgaatacacgcaggtcatcatcaaggaatcggaccggctgcagacgctggtggaccggctgctggagccgcaccggcatccgcatatcgtgtccagcctgaatatccacgaagtgctggagcgcgtgcgctcggtggtgctggcggagttccccaacgggctggagatcgtgcgcgactacgacgccagcctgcccgagctgcagggcgacatggagcaactgatccaggccgtgctcaacatcgtgcacaacgccgcgcaggcgctggccgaccgcatggcgcgcggcgatgcacagatcgtgctgcgcacgcgcgtggcgcgccaggtcacgattgccaagcgcttgttcaagctggcattggacttgcatgtcatcgacaacggcccgggaatttccgaagacatccgcgaacgcatcttctatccgctggtatcgggcagggatggcggcagcggactcggtctcacactcgctcaaaccttcgtgcagcagcacgagggcttgatcgaatgcgagagcaggccgggctgtaccgacttccgcatcctgctgccgctgcactagcttttgctgccgtccgcgagcgatggtgcatccgccgtggccgggcatgcggaagaccaaatgacaccgagcagacaagcgacgcacatgaagccgatctggatagtcgacgacgatcaatcaatccgctgggtcctggaaaaggccctggcccgtgaaagcctgctctcgcgcagcttcaccaatgtgcgggatgcgctggccgcgctggaagaagaccagccccaggtgctgatatcggatatccgcatgcccggcggatcgggcctggacctgctgcaggccatcaaggcgcggcatccgggcctgccggtcatcgtgatgacggcctactctgacctggacagcgccgtggccgcgttccagggcggtgccttcgaatacctggccaagcccttcgatgtcgacaaggcggttgagctgatccgccgcgcgctggaagaaagcctgcgcgaggaagaactggacgaccgcctcgtcgatgcgcccgagatcctcggccaggcgccggcgatgcaggacgtgttccgcgccatcggccggctctcgcagtccaacgtgacggtgatgatcaccggcgagtctggcaccggcaaggagctggtcgcacgcgcgctgcacaagcacagcccgcgtgccaacggtccctttatcgcgctcaataccgcggccatccccaaggacctgctcgaatccgaactgttcggccatgagcgcggcgccttcaccggtgcgcagaccatgcggcgcggccgcttcgagcaggccgagggcggcacgctgttcctcgacgaaatcggcgatatgccgttcgacctgcagacgcgcctgctgcgcgtgctgtccgatggcaacttctatcgtgtcggcggccacaaccccttgcgcgccaatgtgcgcgtgattgccgccacccaccagaacctggagctgcgcgtcaaggaagggctgttccgcgaggacttgttccaccgcctgaacgtgatccggttgcgcctgccgccgctgcgcgaacgcccggaggacatcacgctgctggcgcgtcatttcctgcagaagagcgccaaggaactgggcgtcgagcccaagcgcatgtccgacgaagcgctggcctatgtcagcacgctgccattccccggcaacgtgcgccagctggagaacctgtgcaactggctgaccgtgatggcgccggcccagaccatcgaggtcaaggacctgccgcgcgagatgctggaagccggcaccagcgagccggtcaatgcgccgcggcccgagcgcgttgccgaagcgcgcgcgcccgagtatgaaagcgcgcctgacctggccgactacggcggctacgcgacgacggtggcagaggccgacacggccaccgcagtccggcccgcgtccgtggcgacggtggtcccggccctggcctcggccggctgggaaagcctgctcgccggcgaagcacgggcaatgctcgaagccggccagccggaggtcatggatgtgctgacgcgccgcttcgagaaggccgtgctggaggccgcgctgggtgtcacgcgcgggcgccgcgtcgaggcggcgacccggctcgggatcgggcgcaataccatcacgcgcaagctgcaggagcttgggttcgactgagccagggcagggcgggtgaccagaaaaaccggccgggactttcccggccggttttcttgttttgcgtgaggtattcagccgcgcgcttcgaccagccgctgcgccatctcggcaaagccctcgccaccggccgctgcggtgatataggccggcggcaccggcagctgcggcaggatgtcgcgcacattggccacgccaaccgacagcggaaagtgggcgaacatgctggcatcgttggccgaatcgccgataaacagccattcgtcgcggcgcgcgtccacgtcttcgcccagcagttcggccacgcacagcctgctcatcgacagcttgtcgtgcaggccgaaccagccgttgacatggatcgagctgaccgtggcggtcatgccggcctcgcgcatgatggcggcgatgcgggccacggcgtctgcaggcaacggcgcgacgtcctcggcatggtcgatggccaggtcggcggcatgccaggcctggtccgaggccagcgcgcagcccggcacttcgcgcacgatgcgctggcccagcgcttcgatgcgctccaggttgcgcgcgcgcgtggcggcatcgtccaggaagcgggtctgcaggcggccgttgtgcaagtgcgagtagaacgcaccgttctcgccgatgatggcgtcgaccggccacagccgggtcaggatctcggcccaggcgatgcagcgcccggtgaccgggatcacgtgcaggcccgcgcggcgcagcccgtcgagcgccaggtaggtcgaggccggcagccgcccgtcggtggtcagggtgccgtcgatgtcggtcagcacgccgcgcacgcgctgcagcacggaattagagagcttgttcagggattgcatggcgggccattgtaaccgcggatctggcggcaatttcccttattgcactgcaaaaggcatcgtactggccatactggtgaatctgctgatttgctagctcaggtgcgacaggcgtaacatgccgctgtcacaaaaaaatcacatactgtcggattttcgaccgaccggaacagacagaccaaaggagagccaccgatgtccttatcccgtaccgtgctcaaactcgcagcgctggcagccctgaccggggccggcagcgcccacgccgccgttgaaatccagtggtggcacgccatgcagggcgccctgaacgacaaggtgaacgagatcgccaacaagttcaacgccagccagtccgaatacaaggtggtgccggtcaacaagggcaactacgacgaaaccatggctgcgggcattgcggccttccgcgccggtggctcgcccgccatcctgcaggtgtttgaagtgggcaccgccaccatgatgagcgccaagggcgcgatcaagccggtatcggcggtgatgaaggacgccggcgagaagttcgaccagaaggcctatatcccggcggtggcgggctactacacctcgtccaagggcgagatgctgtcgttcccgttcaacagctcgaccacggtgttctactacaacaaggacgccttcaagaaggccggcctggatccggaaaagccgcccaagacctggcccgaggtgatgcagtactcggccaagctcaaggcctcgggcaccaactgcgcctacaccaccgactggcagggctgggtccacctggagagcttctcggcctggcacaacacgctgtacgcgaccaagaacaacggcttcggcggcaccgacacgcgcctgctcttcaacagcccgctgcacgtcaagcacatcaccaacctgcaggacatggtgaagaagggctatttcagctacggcgggcgcaaggctgagtcgcaggccaagttctacaacggcgagtgcgcgatgttcaccggctcgtcggcatcgctggccaatatccgcaagaatgccaagttcgcgttcgcggtggcacagctgccgtattacccggaggtgcagggtgccccgcagaacaccatcatcggcggcgcttcgctgtgggtgatgggcggcaagaagcccgacgagtacaagggcgtggccaagttcttcaatttcctgtcgcgccccgagatccagtctgactggcaccaggccaccggctacctgccggtgacgatggccgcctacgagatgacgaagaaatcgggctactacgacaagaacccgggtgccgatgtgtcggtgcagcagatggtggtcaagaccaccgacaagtcgcgcggcgtgcgcctgggcaacatggtgcagatccgcaccgtggtggacgaggaactggaagccgtctgggccggcaagaaggagcccaaggcggcgctggactcggccgtggcccgcggcaatgatctgctggagcgcttccagaagactgcccgcgagtaagccggcatagccagcaagctgatgtgacaatcgggcggtggcgaaacctccgcccgattgcattgtggacggccctgtctcaccgatcggggccctccgcaactccgtacctagtccgatgccgcgacccgcagcattcgccggaatccgttcatggaaaaacgcgtcgttttccgttcgccgtggctgccgtatctgctggtgttgccgcagatcgcgatcacgctgatcttcttcttcctgcccgccgggcaggcgctgtaccagtcgatgctgcagcaggatgccttcggcatcaaccttgagttcgtcggcctcgacaacttccgcatgctgtggaacgacccgctgtacgtggagtcgttccagaccaccgccatctttgccgtgggcgtgaccgtggtgggcctgactaccgcgctgctgctggcctattttgccgaccgcatcatccgcggcgccgtcggctacaagacgttgctgatctggccgtatgcggtggcgccggccgtggccggcgtgctgtggatgttcatgttcaacccgacgctgggcgtggtgtcctatgcgctgcgcaagctcggcgtggaatggaacttcctgctcaatggcgaccaggcattgctgctggtggtgctggccgccgcctggaagcagatcagctacaacttcctgttcttcctggcgggtctgcagagcatcccgcgctcgctgatcgaggccgccgccatcgacggcgccggcccatggcgccgcttctggtcgatcatgttcccgctgctgtcgccgaccaccttcttcctgatggtgatcaacgtggtctacgcgttcttcgataccttcgcgatcatcgacgcggtcacccacggcggcccgttcaattcgaccaacacgctggtctacaaggtcttccatgacggcttccgcggcatggacatcgggggctcggccgcgcagtcggtggtgctgatggtgatcgtgatcgcgctgaccgtggtgcagttccgctatgttgaacgcaaggtccagtactgacggagacagcacatggtagaacgtcgccccttccttgatttcctgagccatgcggtgctgatcctgggcatcgtgatcgtggtgttcccggtgtacctgaccttcgttgcgtccacgctgaccgccgaagaggtgctggacgcgccgatgacgctgatcccaggcagccacctgatcgagaactatcgcaccgtgctgttccagggcgtgggcgaggccgcatcgcctgtctcgaccatgatgaagaacagcctgatcatggcgctgggcattgcgctgggcaagatcgcgatctcgatcatctcggcctttgccatcgtctatttcaagttcccgctgcgcaagaccttcttctggctgatcttcatcacgctgatgctgccggtggaggtgcgcatcctgccgacctacaaggtggtgtcggacctcggcatgctggacagttactttggcctgaccgtcccgatcatcgcgtcggccaccgccaccttcctgttccgccagttcttcctgaccattccggacgagctggccgaggccgcgcgcatcgacggcgccgggccgctgcgattcttctgggacgtggtgctgccgctgtcgcgcaccagcatcgccgcgctcttcgtgatccagtttatctacggctggaaccagtacctgtggccgctgctgatcaccacgcagaagtcgatgacgccggtggtggtgggcgtgacgcagatgatctcgcgctcgggtgacgcggccaccgactggaacctggtgatggccaccgtgatgctggcgatgatcccgccggcggtggtggtggtgctgatgcagaagtggttcgtcaagggcctggtcgaaacggaaaaataaggcgcggtggccacgagccacgcgcaggacaacagcaatggcaaaactgtcgctacgcaacgttcagaaaacctacgccggcagcgtccaggtggtgcacggcatcgacatggagatcgccgacggcgaattcatcgtcatcgtcggcccctcgggctgcggcaagtccacgctgctgcgcatggtggcggggctggaaaccatcaccggcggcgaaatccatatcggcgacaaggtcgtgaataacctggagccggccgagcgggacatcgccatggtgttccagaactacgcgctctatccgcatatgagcgtgtacgacaacatggcctacggcctgaagatccgcggcatggccaaggccgagatcgcgcagcgggtgaaccatgccgccggcatcctggagctggcgccgctgctggaccgcaagccgcgccagctatcgggcggacagcgccagcgcgtggccatgggccgcgccatcgtgcgcgagccggcggtgttcctgttcgacgagccgctgtccaacctggacgccaagctgcgcgtgcagatgcggctggaactgaaggagctgcaccggcgcctgggcaccaccagcctgtacgtcacgcacgaccaggtcgaggcgatgacgctggccgaccgcatgatggtgctcaacgccggacgcgtcgagcagatcggcacgccgctggaagtctattcgcgtccggccagcaccttcgtggccggctttatcggctcgccgccgatgaacctgatcccggtggcgcgcaacgccggcggcgacactggcgcgcagatgcgcgtggtggcgaaggaaggcgaggccgccaacgccacgctggggcacctgccgatggggctgcacctgccggagcaggcactgctggggctgcgcccggagcatatcgagccgtgcgccgcgcatgaggccatcgccgaagtcgatgtgcgcgtggtcgaggccctcggcgcggattcctttgcctatggctcgcttggcggacaggcggtggtggtgcgcctggacagccatgcgcacgtgcgcgccggcgaccgcctgccggtgacgtcgtcggcggagcacctgcatttctttgcgcccgatacgggcaagcgcatcgaggcctgacatgaccagcgtaaccgacactgcctggcggtacccgagccatatcgcgcaccgcggcgccggcaagctggcgccggagaacacgctggcagcgtttcgccacggcgccggctttggctaccggatgttcgagttcgacgtgaagctgtcggccgacggcaagccggtgctgatgcacgacgccacgctggaccgcaccaccagcggccagggcagggtggatgcgctgacactgggcgaactcgcgcagctggacgccggcacgtggcacagccccgccttcgccggcgagcccgtgccgacgctggcggccatcgcacgctatacccaggccaacggcttgatggtcaatatcgagatcaagccagtgcccggcaccgaggcgcgcaccggtgcggcagtggcgctggacgcgcagtcgctgtgggcggctgccgcggtgccgccgttgctgtcatcgttttctgaagaggcgctggccgccgcggcgcgcgtcgcgccggacctgccgcgcgcgctgctgctcgaccagctgcccgcggactggctggagcggctgcgccggctgggctgcgtggcgctggatgccaaccaccgcgaactggatgccggcgtgatcgccgccgcgcacgcggccggtttccgggtcctctgctataccgtgaacgatccggcgcgggcggcgcagttgctggcctggggcctggacgggctgatcacagacgccgtcgaccagatcgcgccttgattcaaattgttgtgcgggtgttgctagttcgctgattgcgaaccgaattgtcgtgggtaggtgtttcgtatcgcgaaaagtccacattgatcaaaggcaattcatgctattcttaacgccgtgaagactttaggtccttccccgcacaacttgccctttcgggccttgtgaggaagccatcacacgcggcacccaagcggtgccgtttgtgtaggcgcctcagttgggctcccaagagttgtttgcgatccgctaaccggtcaagccgtgtcgcggaaggttgaataacccgctgaactccggcattcccggagaatagtgagcgtcccatgatgcagcagtatcagagcaactcgtacctcttcggcggtaacgccccgtatgtcgaagaactgtacgaggcctacctccagaaccccgcctcggttcccgacaattggcgcgcgtatttcgacgccatgcagaacgttcctgcggtcgacggctcgaacggccgggatatcccccacgcccccatcgttgcctcgttcgccgagcgcgccaagcaaggccccatcaggaccatcgttgcctcggccgattccgacatgggccgcaagcgcgtcgctgctacccagctgatcgccgcctaccgcaacatcggttcgcactgggccgacctggatccgctcaagcgccaggagcgtccgcccctgccggatctggacccggcgttctacggtttctccgaagcagacctcgacatcgtcttcaatgccagcaatacctactttggcaaggagtcgatgagcctgcgcgagctgctcaacaacctgcgcgaaacctactgcggcaccatcggtttcgaattcatgtacgtgagcgaccaggcgcagaagcgctggtggcaggagcgcctggaaaccacgcgttccaagcccgtgttcacgctggaaaagaagaagcacatcctggaccgcctgaccgcggctgaaggcctggagcgcttcctgcacaccaagtacgtcggccagaagcgcttctcgctggaaggcggcgaaagcttcatcgccgccatggacgagctgatccagcacgccggcagcaagggcgtgcaggaaatcgtgatcggcatggcccaccgtggccgcctgaacgtgctggtcaacaccctgggcaagatgcccgccgacctgttcgccgaattcgaaggcaagcacgtcgacgacctgccggccggtgacgtcaagtaccacaagggcttctcgagcgatgtctcgaccgaaggcggcccggtccacctgtcgctggcgttcaatccgtcgcacctggaaatcgtcaacccggtggtcgaaggctcggccaaggcccgccaggaacgccgcggcgaagtcggccacaaggaagtgctgccggtgcaggtgcacggcgatgcggcctttgccggccagggcgtggtgatggagacgctgaacctcgcgcagacccgcggctacggcacgggcggctcgatgcacatcgtcatcaacaaccagatcggcttcactacctccgacccgcgcgacgcgcgttcgacgctgtactgcacggacgtggtcaagatgatcgaggccccggtgctgcacgtgaacggcgacgatcccgaagccgtggtgtacgccatgcagctggccgtggacttccgcatggagttcaagaaggatgtcgtggtcgacatcatctgcttccgcaagctgggccacaacgagcaggacaccccggcggtcacgcagccgctgatgtacaagaagatcgcccagcaccccggcacgcgcaagctgtacgctgacaagctggccgcgcagaacctggtcccggccgagttcggcgacgagaaggtcaaggcataccgcgccgcgatggacgccggcaagcacaccgccgaccccgtcctgtcgaacttcaagaacaagttcgccgtggactggatgccgttcctgaaccgcaagtggaccgacgccgccgacaccgccgtgccggtgaccgagctcaagcgcctggccgaacgcatcaccaccacgcctgagaccctgaagctgcacccgctggtggagaaggtcgtcaaggaccgcgccaacatgggccgcggcgaccagccgctggactggggcatgggtgagcacctggccttcgcctcgctggtgtcgtcgggctacccggtgcgtatcaccggccaggacgctggccgcggcaccttcacccaccgccacgccgtgctgcacgaccaggcccgcgagcgctgggatgccggcagctacgtgccgctgcagaacgtgtcggaaaaccaggcaccgttcacggtgatcgactcggtgctgtccgaagaggccgtgctcggcttcgaatacggctactcggccgccgaaccgaacgcgctggtgatctgggaagcccagttcggcgacttcgtcaacggcgcccaggtggtgatcgaccagttcatctcgtcgggtgaagtaaagtggggccgtgcctcgggcctgacgctgatgctgccgcacggctacgaaggccagggcccggaacacagctcggcccgtatcgagcgcttcctgcagctttgcgcggaccacaacatgcaggtctgccagccgaccacgccggcccagatcttccacctgctgcgccgacagatgatccgtctgttccgcaagccgctggtgatcatgacgccgaagtcgctgctgcgtaacaaggacgctgtgtcgccgctgtcggacctggccaagggccacttcgagacggtcatccctgaccacgaagagctcaacgccagcaaggtcaagcgcgtcatcatgtgctcgggcaaggtctactacgacctggtcaacacgcgcaaggaacgcgaggccaatgatacggcggtgatccgcctggaacagctgtatccgttcccgcacaaggctgtggcagcagaactcaagaagtatccgaacgccaccgaaatcgtgtggtgccaggacgagccgcagaaccagggtgcctggttcttcgtgcagcactacatcatggaaaacatgacggatggccagaagctcggttatgccggtcgtcccgcttcggcttcgccggcagtgggctactacgcaaagcacaacgagcaacagaaggcgctgctggaggctgccttcgccaagctcaagggctttgttctgaccaagtaatcaagcggcagctacggcggcgcgcgcagacggccgccgtggcatagccagcataaagacaacacgcataacacgaggaattcacaaccatggctatcgttgacgtcaaggttccgcagctctccgaatcggtcgccgaagcgaccatgctcaactggaagaagaagccgggcgaggctgttgcacaggacgaaatcctgatcgagatcgaaaccgacaaggtcgtgctggaagtgccggccccgtcggctggtgtcctgtcgattatcgtcaagaacgacggcgacaccgtcgtggccgatgagatcatcgccaagatcgacaccgaagccaccgctggcgccgccgcaccggctgctgccgctccggcacctgccgccgctgccccggcacctgccgctgctgtcgccgctccggccgccgcaggtggtgtggcgatgccgtcggctgccaagctgatggcagaagccggcctgtcggctggccaggttgcaggcaccggcaaggacggccgcatcaccaagggtgacgcgctggccgctgctgctgccccggccgccaaggctgctccggctccggctgccgccaagccggcgctgcagcaggtttcggccccggttgactttgccgcgctgggcgaccgcccggaagagcgcgtgccgatgagccgtctgcgcgcccgtatcgccgagcgcctgctgcaatcgcaatcgaccaacgccatcctcaccaccttcaatgaagtgaacatgaagccggtgatggacctgcgcaacaagtacaaggaccgcttcgagaaggaacacggcgtcaagctgggcttcatgtcgttcttcgtcaaggccgcggtgcacgcgctgaagaagttcccgctgatcaatgcttcgatcgacggcaacgacattgtctaccacggctacttcgacatcggcatcgccgtgggttcgccgcgtggcctggtggtgcccatcctgcgcaatgccgaccagatgagcctggccgacatcgagaagaagattgccgagttcggcgtcaaggcccgtgacggcaagctgtcgctggaagaactgaccggcggtaccttctcgatctccaacggcggcgtgttcggttcgatgctgtcgaccccgatcatcaacccgccgcaatcggccatcctgggcgtgcacgccaccaaggaccgcccggtggtggaagacggccagatcgtgatccgcccgatgaactacctggcgatgtcttatgaccaccgcatcatcgacggccgtgaagccgtgctgggcctggtggccatgaaggacgcgctggaagatccggcccgcctgctgctggacctgtaattaacggtccccccgcgcacgcctgccgtgcgcggggcgcgcttcccccgtgatgaaggcgcgccggcacaagctgtcgccggcgcccacaaaggaatttccatgagcaaacaattcgacgtgctggtgatcggcgccggccccggcggctacatcgccgccatccgcgccggccagctgggcctgaacgtggcctgctgcgaaggcaatccgtatgacgatcccaagggcgaagcccgcctgggcggcacctgtctgaacgtgggctgcatcccctccaaggcgctgctggcttcctcggaggagttcgagaacgtccagcaccacctgggcgaccacggcatcaccgtgggcgacgtcaaggtcgacgtggccaagatgctcaagcgcaaggacgacatcgttggcaagatgaccaagggtatcgagttcctgttccgcaagaacaaggtgacgctgctcaagggctacggcaagttcgtcggcaagagcgccgagggcttccaggtcgacgttgccggtgaagtcgtgaccgccaagcaggtcatcatcgccaccggttcgaaggctcgccacctgccgggcatcaaggtcgacaatgacctggtcagcgataacgagggcgcgctcaagttccccgcagtgccgaagaagctgggcgtgatcggtgccggcgtgatcggcctggaactgggctcggtgtggcgccgcctgggctccgatgtgaccgtgctggaagcgctgcccgcgttcctgggcgccgccgacgaaggcgtggccaaggaagcgcagaagcagctgaccaagcagggcctgaagttcagcctcggcgtgaacgtcaacgaagtgacgaccggcaagaacggcgtgaccgtcaagtacactgacaaggacggcaaggcgcagaccctggaggtcgatcgcctgatcgtgtcggttggccgcgtgcccaataccgacaacctgggcctggacgccgtcggcctggccgcggaccagcgcggcttcatcgaggtggacgaccactgcgccaccaaggtgccgggcctgtgggccatcggcgacgtggtgcgcggcccgatgctggcgcacaaggccgaggacgaaggcgtggccgtggccgagcgcatcgccggccagaagccgcatatcgactacaactgcgttccgtgggtgatctacaccttcccggaaatcgcatgggtaggcaagaccgaagcccagctcaaggccgaaggccgcgagtacaaggccggccagttcccgttcatggccaacggccgtgcactgggcatgggccacgccgacggcttcgtcaagatgctggccgacgccaagaccgacgagatcctgggcgtgcacatcgttgccgccaacgcctcggacctgatcgccgaagccgtggtggcgatggagttcaaggccgccagcgaggatatcggccgcgtctgccacccgcacccgtcgatgtcggaagtcatgcgcgaagccgcgctggccgtcgacaagcgtcagcttaatatgtaaggcgcatgcttcgcattgcctgagtaccggcgcgccgcatccgcggcgcgccgttttcacttgcggcccgtgccgcaggaacccgtcagcatgaacgtcaccgagtactacgagaaggaactgaaggagcgcggctaccagtccgacgaagcgcaattgcgtgccgtggcccggctgcagcagtgctacgacgaatgggtggcctacaagagccgccgcaacaatgcgctgaagaagctgctggtccgtcccgacgtgcccaagggcgtctacctgtggggtggggtggggcgcggcaagtccttcctgatggacagcttctatacctgcgtgccggtggtgcgcaagacgcggctgcatttccatgagttcatgcgcgaggtccatcgccagctcgaagagctgcgcggccgtcccgatccgctggatgagctggccagacgcatcgcgcgccgcttccggctgatctgcttcgatgaattccacgtcagcgacgtcgccgacgcgatgatcctgcatcggctgctgcagcagatgttcgagaacggcgtgcagttcgtgatgacctccaactaccgcccggacctgctgtatccggatggcctgcaccgcgaccgcgtgctgccggccatcgcgctgctgcagcggaagctcgacgtgctcaacgtcgacgcgggcatcgactatcgcaagcgcgcgctggagcaggtgcaggcgtaccacacgccgctcggcgccaaggccagttccgcgctgcgcgacgccttcacctcgattgccggcgtggccgacgagtcgccgctgctgcatatcgagcatcgcgagttgcgtgcgctgcgcaaggccaacggcgtggtgtggttcgactttgccacgctgtgcggcggcccgcgctcacagaacgactacctggagctggcgtcccagttccacaccgtgatcctgtccgacgtgccgcgcatgacgccgcgcatgtcgtccgaggcacgccgcttcacctggctgatcgatgtcttctacgaccacaaggtcaagctgctgatgtcggcggaagtgcccgcggacgaactctacaccgaaggccagatggccaatgagttccatcggaccgtatcgcgcatcatcgagatgcaatcgcgcgaatacctggaatccgagcgccgcaccatggataccacgctcacctgagcgttgttttccggcccggcgcgacgattgccgggccgcattgacctatatcaaggtcgattcgggggcccgcatataccctccatcgggtagaaaaaggttcccatgtcgtcgcccccagtcaccagtccttcagccagcttactggcaccgtacccgccgtccgcgctccgtgatgccttgggcccggctgccgacgccggtgcgcggctggcctgcttccattgcggcctgcccgtcacggacaccgagccgcttgccgccgagctggacggcagccgccgggtgttctgctgcggcggttgccaggcattggcgcagaccctccatgcggccggctttgcgcacctgtacggggatgaagcccgcttcgcccgccccatcgacgacgacgcccgtcgcgaggccgaaccgatctgggccgcctacgacacccctgagttgcgcgcccagtttgtccgcccgctggacagcggccgcgccgagatcacgctggcgccagagaacatccgctgtgccgcttgcgcgtggctgatcgaacagcacctgagccgccagccgggcgttgagtccgcggtcgccaatgtcgccacgcggcgcgtggtggtgcgctggcgcgatggcgcccagacggtggcggggctgctggccgcgctggccggcatcggctacatggcctggccgttcgaagtctcgcgcaccgaccagcaggaccgccgcgcgcgccgcgggctgctgatgcgcatggcggtggccatgctcggcatgatgcaggtcatgatgtatgcgtggccgatctacacgcacgaggccaccatcgaccctggccagctccagctgatgcgctgggccagcttcgccctgacgctgccggtggtgttctatgccgcctcgccgatctttgccggtgcctggcgcagcctgcgccagcgccacatgggtatggacgtgccggtggcgatcggcatcggcgccggctttgccgccagcgcgctggccacggtgcgcggagtgggtgaggtgtatttcgattcggtgacgatgttcgtcgccttcctgctgctggcccgctacctggaactgcgcgtgcgccaggcctcgcgcagcggcgccgagatgctggcgcgccagctgccggccacctgcgaacggttggtcgcgacgggtgaggccggcgagcgtgtgccggtcgcgcgcctgcgtgcgggcgatctgatccgcgtcaaggccggcgagatcgttcccgccgatggcgccgtggtggcgggcgcgagcgaactcgacgaatccatgctgaccggcgagagccgcccggtgcgccgcgccgccggcgagaccgtgctggccggcagcttcaatacggcaagcccgctcgaactgcggatcacgcgcgtcggcgccggcacccgcctggccgagatcgtcgcggtgctggaccgcgcgctggctgaaaagccgcgccttgccacgctggccgaccgcgtcgcgggctggttcgtggcgacgctgctggggctggcggcgctgaccgggctggtatggggtctctggatcgatccgtcgcgcgccttgctggtgacgattgcggtgctggtggtcagttgcccgtgcgccttgtcgctggccacgccggccgcgctggccgcggccggtgcggcgctgtcgcgccgcggcgtgctgctgacacgcggccacgcgctggagacgctggcgcgcgtcaccgacgtggtgctcgacaagaccggcacgctgaccgaagggcgctttgccgtggccgcggtcgagccgctggctgacgccgatcggacccgatgccaggcgctggccaccgcgatggagcgcggtggcgaacatccgatcgcgcgcgcgctggtggccgcggcgcagggtaactccggcatgtcgctccaggtgtccgacatgcgcaacgtcccgggtcagggcctggaggcgatcgtcgatggccaacgcctgcggctcggccgcgccgactttgtcgcggcgctggcgcccgacagcggccaggcaccggacacctggcgcagcgacgcggaccatcctggcgctaccgtggtgtggctgggcgcgccagcgggtccgctggcgcgcttcgtcctggccgatgtggagcggacgcagacgccgcagttgctcgtgcggctgcgtgaacttggcgtgcgctgccacctggtatcgggcgatcacgccgaagcggtccactggtgggcgtcgcacttcggcatagcctgcgtagccggcgcggtcaccccggaaggcaagcgcgactacgtcgcgcggctgcagcagggcggggcggtggtgctggccgtgggcgatggcatcaacgatgcgccggtgctggcgcaggcccaggtgtcgatcgccatcggcagcggcgcgccgctggcccaggccggtgcggacgcggtgctgacgcacggcggcgtggccgagatcgccaccgcactggcggtgtcgcgccggacgcgccgggtggtgcgccagaacctgggctgggccttcttctacaacgtcgtggccatcccgctcgcagcgacggggctggtcacggcctggatggccggcatcggcatgtcgctgtcgtcgttgctggtagtggccaatgcctggcgcctgctgcgcgccggcaagccgcgccacaagggagtctgacagatggaaacgctttacctgctggtgccgatgagcctggtgcttgtcgtggtcatcgcgggcgcgctgtggtgggccctccatgccgggcagtacgacgacctggaccggcccgccgaatcgatcctgctggacaacgacaagccatgaacccgccgcgcggcgcgccctccgaccagggcccagcacgcaggttccatgcatgccctgagcgacttgataaagatcaacgcacatgcagcatggtttttctaaagtcacactgtcagtaggttttttcttttctctaagctttgggggtctgaatggatgtcactgccgcgtcttcacgcgtcgacaccttcaattacggcgtcgtaagacagttcgctgtcatgacggtagtctgggggatcgtcggcatggccgtcggcgtgctgctggcagcacagctgatctggcccgaactcaacttcaacacaccctggctgtcgtttggccggctgcggccgttgcataccaatgcggtgatcttcgccttcggcggcagcgcgctgttcgcgacctcgtactacgtggtccagcgcacctgccaggcccgcctgttctgcggcccgctggccgcgttcacgttctggggctggcaactggtcatcgtcgccgccgccatcacgctgccgctggggatcaccagctccaaggaatacgcggaactggaatggccgatcgacctgctgatcaccgcggtctgggtggcctacgcgatcgtgttcttcggcaccatcgtcaagcgcaagacccggcatatctacgtcgccaactggttctttggcgcctacatcctgaccatcgcgctgctgcacatcgtcaacaacatcgagatgccggtgtcgctgtggaagtcctactcggcctatgccggcgtgcaggacgcgatgatccagtggtggtacggccataacgccgtgggcttcttcctgaccaccagcttcctggggatgatgtactacttcattcccaagcaggccgagcgcccgatctactcctaccgcctgtccatcgtccacttctgggcgctgaacttcacctacatgtgggccggcccgcaccacctgcagtacaccgcgctgccggactgggcacagtcgctgggcatggtgttctcgctgatcctgctggcgccgtcgtggggcggcatgatcaacggcatcatgaccctgtcgggggcctggcacaagctgcgcaccgaccccatcctgaagttcctggtggtggcgctgtcgttctacggcatggccacgttcgaaggctcgatgatgtcgatcaagaccgtcaacgcgctctcgcactacacggactggaccatcggtcacgtgcactcgggcgcgctgggctgggtcgcgatgatctcgatcggctcgctctactacctgattccgcgtctgttcggtgagaagcagatgtacagcgtccggctgatcgagtggcacttctggatcgcgaccattggcgtggtgctgtatatcgcctcgatgtggatcgccggggtgatggaaggcctgatgtggcgcgccacgcagcctgacggcacgctgacctatgccttcgtcgaagcggtcaaggccaagtacccgttctacctgattcgcttgctgggtggcctgtgcttcctgtccggcatgctgctgatggcctacaacgtgctcaagaccatcgtcggcaagcccgccgtggatgcgccgattccggccagcatcactgcctctgcccactgatcaatccaggatagaaagatgtccgacaaacaacgcttcttttcccacgaaacgctggagaagaacatcggctggctgatcatctgcacgatcctcgtggtcagcattgcgggtctggtccagatcgtgccgctgttcttccagcactccaccaccgagccggatccgggcatcaccccgtattcgccgctgcggctgatgggccgcgatatctatatccgtgaaggctgcgtcggctgccactcgcagcaggtccgcacgctgcaggccgagaccgagcgctacggccacttctccacggcgggcgagtcggtctacgaccacccgttcctgtggggctccaagcgcaccggtcccgacctggcgcgcgtgggcgggcgctactcggatgactggcagcgcatccacctgcgcaatccgcgcgacgtggtgccggaatccgtgatgccatcgtacccgtggctggaaaaggccgagctgcccaccaacgacatccaggcccgcatgcgcgcgctggtgcgcctgggcgtgccgtacacggatgccgagatcgccaaggcaccggacgagctcaagggcaagaccgaagaagatgcgctggttgcctacctgcaaggcctgggcaccaaccgccgcaacgtccgcgtggattccgccgcggctgcggcacccaaggagtaagccatggccatgatcactgccattgcgaccgtcgtgtcgatggtcgtcttcctggggatctgctggtgggcctggtccgccggccggcaggccgctaaccgggaatccgccatgctgccgttcgcgctgcctgacgaaaccacgacaacatcgagccggaacacctagccatgagcgatttcatttccgaattctggagttattacattgccgctatcgcgctcatcggcatcgtctggtgcgtgtggctgctgttctcgcaacgcaaggtcgccaagaccaccggcggcactgaagacaccggccatgtctgggacggtgacctgcgcgagctgaacaacccgttgccgcgctggtggatgtggatgttcctgctggcctgcatcttcagcctggcctacctggtgctgtatccgggactgggttcgtatgccggcgtgctgaagttctccacgcagggcgaacttgccgcgcaccgcgcggcgcaggagaaaatgcagaacgagatctactccaagtacctgaagatggacgtcaagcaggtggcggcggatccgcaggcgcgcgagatcggccagcgcctgttcctgaactactgcgcacaatgccacggctcggacgcgcgcggcagccgcggctttccgaacctgacagacagcgactggctctatggtggcgaacccgacatcatccagcagaccatcaccaagggccgcaatggcgtgatgccgccgtttgccgcggccatcgacgccaagcaggcgggcgacgtggcgcaatacgtgcgctcgctgtcgggcctgtcgtcggacccgatccgtgcgtcgcgtggcgagggcgccttcaagacgacctgcgtggcatgccacggcgccggcggcaagggcaaccaggcgctcggcgcgcccaacctggcggacaacgtctggctgtatggcagctcggaaggcagtatcgtcgacgcaatcctgaagggccataacaaccacatgcctgcgcatgaggagatcctgacgcctgaacgcatccggatgctgacggcctatgtctggggtctgtccaatactgggggcggagccgggcaatgaccgacgactcatgtgagcgggcgctggcagctcgcgggagagcatgcccatgaacgcacccgggaccgaagaaatggcccgggcggccgacctgcaacggtcggccgctgcgccgggcgagacctctgacgaaacgctctacgaggtccgccgcaagatctacccgcgctcggtgacgggcgcattctccagctggcgggtctggctggtgatcctgacccagctgatctactacggcacgccctggctccaatggaatggccgccaggccgtgctgtttgaccttggcgagcgcaagttctacatcttcgggctggtgctgtggccgcaggacgtcatctacctggcggtgctgctggtcatctcggcgctggcgctgttcctgttcacggcgatcgcggggcggctgttctgcggctatgcctgtccgcagacggtctacaccgagatcttcatgtggatcgagcggcgggtcgaaggcgaccgcatcgcccgcatccggctcgatggcgatccgtggagcctgcgcaagttccgtctcaaggcgaccaagcacttcctgtgggtgctgattgcgctctggaccggctttaccttcatcggctatttcgcaccgatccgcgaactgggcggcgaggtgctcagcctgtcgctggggccgtggcagtcgttctggatgctgttctacgcgttcgccacctggggcaatgcgggcttcatgcgcgagcaggtgtgcaagtacatgtgcccgtatgcgcgtttccagagcgtgatggtggatcgcgatacctatgtcgtgacctacgacgtcggccgcggcgagccgcgcggaagccggtcgcgcaagaccgaccaccacaaggcggggcttggcgactgcgtcaactgcagcatctgcgtgcaggtgtgcccgacgggcatcgatatccgcgacggcctgcagtacgagtgcatcggctgcggcgcctgcatcgacgcctgcgaccaggtcatggacaagatggaatatccgcgcggcctgatccggtacacctcggaaaacgcgatgcgcaagggcttgtccgcggcggcatcacgcaagcgcctgctgcgcccgcgcgtggtcatttattccgtgatctgggtggcgttgctggccgggttcatggcttcgatcgcgctgcgcacgccgctgaaggtcgacatcatccgcgaccgtggtgcgctcggccgtgaagtggaaggccgctggatcgagaatgtctatcgcctgcagctgatcaacaccaccgaagcgccgatgcagatcagcgtgcgcgccgacagcgacgaactgaagaacctgaccgtggaatacgataagcaggccgaatcgctggcgccgacgtccaaccggttgctgccgatccggatccgcgtgccgatcgaggccgcggcgcagggcacgcacaagatcaacgtgacggtgatgagcgaaggcacggagcaggggcatgccgaaatccggcaatccaccagtttcatcgtgccgcgcgatttgtgaagctaggtcgtcaagatgaagggggcaagatgagtcagcaaggcaatccgtggtggaaggagccgtggccgtggctgttgatgagcggcccgctggtggcgatggtggcgtgtggcgtgacgatctggctggcatccacgcatccggacatgccggtgcagggtgcaacgcgccatggcctggtggtcgagaaggccgacgccgcgccgcccaaggctgccgctgtgaggcagccatgaggttgcgctggctgatgtgggtactctggccggcgttcctgatggccgggttcgcgaccgcgacggtgttttcggtggtggatcccggtgacctgaacttcttcggccagccgatcgaagcgtcccgcgaatcggtctacaccgttggtttcctgatggcctgggtgttctgcgcgttgtccagcggactgacgctctacaccatgccgacgcggctcagcgataccgacgaactggaataagcggatcggtgtgaggtctgcgctgccatgtccgcatgcggtacctggcagcgccttggccgcttagcaggagcggctgtagagctgcttgatgccgtcgatgtccacgagcttgacgtggcgctggcgaatctggatcaggccggcttcggcaaagcgggagaacaggcggctgacggtttcgagcttcaggcccaggtagctgccgatctcttcgcggctcatgcgcatcacgaactcggacgccgaatagccgcgtgccgacaggcgctcagagaggttgatcaggaaggcggcaagccgttcctcggcgcgcatcgagcccagcgtgaccagcatcagttggtcatgcgtgatttccttgcccatcaggcgcaggaactgctgctgcagcgacggcaggtctgccgacagggactgcaactcgctcatgcggaccacgcagacttcggtgtcctccagcgcggcggcatcggaggcatgctgcatctcgcccagcccgtcgagaccgacaatttcgccgggcaggtggaagccggtaatctgcgagcggccgtcttcagtggtgacgtgggtcttgagcgtgccaaagcgcacggcatagaccgcggtgagcggatcgcccatgcgatacagggtttcacccttgtgcacacggatgcgttcctgaaccagcgtgtccatcttggcgaggtcttgctgcgacatgccgaccggaaggcacagctgccccatcgcacaggtggagcagcgtggtgacatctcggtaatgggaatggaggtgagcaattggaacctgctagaaatggcagcgagggcgcgataacggcattttaccgtgcgatgtgatgtggtagggagtgagaattgacacttggcgtactgatcagcgtttttctgctggctttgctgggcggggtccactgcgccgccatgtgcggcggcgtggcgctggccgtggagcagcgtcacggcgcggcggcgacgatcagtctggtgcccagccgtgccgcctggctcggcgagttgctgataatgcacctgggccggatctcgacctatatgctgcttggggccgcgctaggcgcggtcggtgcttcggcgtggaaacaggactatctgccggtgcagcgctggctgttcggcgcgggcagcgtcatgctgctgtggtcgggctggcggttgctgcgcggcaacacgtttaccgtcgactggctggagcggctggcgtcgcgtgccagcgcagcggtggcgcgccggctgggtggcgtggcacgcggcatgccgtcctttgtgcgcgcacgcggcggcctggcgcggcgatacggcgtgggcctggcgtgggggctggtgccgtgcggcatggtctatggggcgctcacgctcgcgctgctggcgggcaatgcggcgtccggcgcactcgtgatgggcgtgttcgggctcggcacactgcctaacctgctggtgctctccggcctgtcaggctatttgcgtacgctgtcgcgacgtcccggcgtgcgcctgggggccggcctggcggtaatggcgttcggcggccttggcattgcgcgagcggtgctgttgccacattcgctggccgagcatggattctgcctggtgttctgaggcgccggcgctgcgccggcaacggatgatggttgcaggcgggggcgggaatgccatacaatcgccaacattgcggtatcgcgcggtgtcttgtgagccgcggtaagcagcgggcgagcagcgccaggcggccttcataccagaaggtgagttcagggcaggggaagcggaaggttttcgatgcccgtcccgtccccacagtccatccggttcaaaagatctggttcaaaagtccggctggcactgcggtgttggcgatgccggccttgctcccgatacccgtttttcttgcgtccgaggccttcagttcgctgacagcgacgtccggtatgtgcggacgcgctacgcaagaggttcgctggctggcccataacggcatgcgaacgatctcctgccggaacgcccggcaactcgatgcaaagatagggaagtgcacggcttggatgcagcaggtatccggctagctgcgcaatgagatggcggtggctttcgcaccgctgtatccaaaatctccggtgccccggatccgtccgggagcaggtgcaaagacaggctgcacaccatcaacatgaatacccaagaggcgaagatcgtcctcgagacggcgctgatctgcgcgcaggaaccgttgcgcgtcaatgatctgcggcggctgtttgacgacgacgtcggcgcagacaccatccgcgtgctgcttgatgaactgcggcaggactggcggccgcgcggcgtggaactggtggccctggccagcggctggcgcttccagagccggccggaaatgcgtgaatacctggatcggctgaatccagaaaagccgccaaaatattcgcgcgcggtgatggaaacactggcgatcattgcctaccggcagccggtgacccgcggcgatatcgaggaaatccgcggcgtgacggtcagcacggaagtcatcaagaagcttgaggaccgcagctggatcgaggtgatcggacaccgcgacgtgccgggcaggccggcgctgtatgcgaccaccaaggcgttcctggacgatcttggcctgcgtacgctggatgagctgccgccgctggaagatgcccaggcgcaggcgcaggcaaccctgctggaacagcaggccatcaattttgaagacctggctgcaaacaaggcggccagcgccgacgaagaggcttttgccaaccccgccgcgcatgcggcggatgtggctgaagcatccgtcgcaaacgaagccgagacgaccggcccggtcgaccaaggcgccaatggctttgacgcgcaaccgctgcaagctgcagccgacgatgccgccgaggccgcttccaccgaaccagccgcacccaatccggacggggcgcggggcgatttgccggacaacggcaccccgccgcacccgagcgagcacgacgagcgcgtgccgaactgaacaacatgcaacatccgatagtgaatatcttgtctgattccgttgagcaagacacccgcaatgcgggcgcacccgccgacaccggcgccgcagaacccggatcgggcagcgaagccgcgccccgccgcaaggggctgcgccgcgggctgaggaacctggtcgcatcgcgccgccaggcacaggaccgcggcgagggcgccgaaggcgccggcggccaggccgatgccggtgaagcgggcgccgcacaggcggcgggcggtgcgcgcggtggccagcgtggccgcggcaagcgcaagacggggcagggcgagggtggccagggtagccaaggcggccagggcaccagcaaggcagaaaaggtcgaccgtgcggccagggccgaaggcaccgacaagcctgagcagcccggccgcaagcgcaagccggtccagcgctcaggcaaggcggcagcgccgggcgaggcgcagggtgccggtgcgcggcagcagggccgccgcaaggatggcggcaagccgcaggcgccccgcaagggccagggcggcggggacaagaccacggcgagcagcgaagacctgttccgcttcgtgatctctgagcagtacgacaacgaagacaccgtcattccgcgcaccaaggccaagccggtgcgcgagctgtcggccgacgacgacgcgcccaagctgcacaaggtgctggccgagggcgggctgggctcgcgccgcgagatggaagaactgatcctgcagggccgcgtttcggtcaacggcctgccggcccatatcggccagcgcatcctgccggcggaccaggtccgcgtgaacggcaagctgatccaccgcaaggtgtcgaccaagccgccgcgcgtgctgctgtaccacaagcccgccggcgagatcgtcagccagtccgatccggaaggccgtccgactgtgttcgacagcctgccgcgcatcaagaccggcaagtgggtcgcggtgggccgcctggacttcaatactgaaggcctgctgatcttcaccacctctggtgatattgccaaccgtttcatgcatccgcgctatggcgtggagcgcgagtacgcggtgcgcacgctgggcgagctggccgaggccgaccgccagcgcctgctgcatggcatcaagctcgatgacggcgaggccaatttcctgcgcattgccgacggcggcggtgaaggcgtcaaccagtggtaccacgtggccctgaccgaaggccgcaaccgtgaagtgcgccgcatgttcgaggcggtcgggctgaccgtgtcgcgcctgatccgcacccgctacggccagttcctgctgccgcgtggcctcaagcgcggccgctggcaggaagtcgagcccaatgacgtcaaggcgctgatggccggtgtcggcctgaaggtgcccggcaagggcgagcaggctcccaagggcgccaccaaggtaggcgggcgcaagcagcgcaccgaagccgcgattgccggcatgccgatgcccacgggcatggacggcctgccgcgcttcgaccagggcggcgcccggggcggtagcggcggccgcagcagccagccggatccgatgaagacctcgatgggctatatcacccacgggcccaccttgctgacctcgcacgcggccagcctgggcggcgggcgcggcactggcgcacgccagggacgtggtggcgccggcatgggcggcatgggtggcatgcgcggtcagggtggtcagggcggcctgggtggccagggtcagggcaagccgcgtcgcggcggcggcgaagccaacggcaatgtgatgccgaaggcgtcgaagccgggcggcaaccgttccccgcgcggcggtagtggcggtggcggcggcaaccgtggtggcaaccgcggcggcaaccgataagcgctgaatccggcgcatggcgggttgaacgcccgccggcgccggattcagtgcacggaaatgtctggcttttgccttttcgacataatccgcgtataattcaagtctattcaaaaagccatcctcgtcgaggatgggcgaatgatgggcattgcgcccatttttttttggttcgcccgtttttcggttctctccgctggggcggggggatggcggacaggcagggctgcagcagggtcgtcccggacggcaccggcgggtttgcctgccacggtgttgatggccattactcgggataacagtgcatctggcagatttgatcgaaaccaccctaagcggcatgggatatgagctggtcgagctcgagcgtgccccggccggattgctgcgtgtctatatcgatcagcctgaaaccggcattgccatcgaggattgtgaaaaggtgagccgccagctcacccacgtgttcacggtcgagaacgtcgactatgaacgcctcgaggtctcgtcgcccggactggaccggccgctgaagaagctggccgactacgtccgctttgccggcgaggaggcgcgcgtgacgctgcgcctgcccgtcaacggacagaagaacttcacaggcatcctgcgcgagcccaccggcgcggcgggcgaggagaagattggcctggagttcgaaggcaaagatggcccggcgctgctggaatttgccgtatccgatgtcgacaaggcacgcctggtgccggtgatcgacttcaaaggaaatcaaagaaaagggaacaagcaatgagccgcgaagttctgttgctcgtcgatgcgcttgcgcgtgagaagaacgtcgacaaggatgtggtattcggtgccctggaggcggcgctcgcctcggccaccaagaagcgtttcgaggaagacgtggatatccgtgtcgcgatcgatcgcgagtcgggcgagcatgaaaccttccgccgctggctggtcgttcccgacgagctgggcctgcaagagccggacaagcagatcctgctgttcgaagcccgcgatgaaaaccccagcatcgagctgggtgactttatcgagcagcagatcgagtcggtcgagttcggccgcatcggtgcgcaggctgccaagcaggtgatcctgcagcgcatccgcgacgccgagcgcgagcagatcctgaacgactacctggatcgcggcgagaagatcatgaccggcacggtcaagcgcgccgacaagaagggcctgatcgtcgagtccggccgcgtggaagcgctgctggcccgcgaccagatcatccccaaggaaaacctgcgcaccggtgaccgcgtgcgtgcgtatatcctgaatgtggaccgcgccgcgcgcggcccgcagattgaactgtcgcgcaccgcgcccgagttcctgatcaagctcttcgagaacgaagtgccggaaatggaacaaggcctgctggagatcaaggcggctgcccgtgatccgggcgtgcgcgccaagatcgccgtggtcgcgcatgacaagcgcatcgacccgatcggcacctgcgtcggcgtgcgcggtacccgcgtcaccgcggtgcgcaacgagatcggcggcgaggccgtggacatcgtgctgtggtcggaagacccggcgcagttcgtgatcggcgcgctggcaccggcacaggtgcagtcgatcgtggtcgatgaagaaaagcacagcatggacgtcgtggtcgacgaggaaaacctcgccgtctcgatcggccgcagcggtcagaacgtgcgcctggcgaccgagctgaccggctggcagatcaacatcatgacgcaggaagagtcggcgcagaagcaggccgaagagagcgatgtcgtgcgcaagctgttcatgtccaagctggacgtggatgaggaagttgccgacatcctgatcgaggaaggcttctccacgctggaagaagtggcttatgtccccatcagtgaaatgatggagatcgaggcctttgacgaagacaccgtcaacgagctgcgcaatcgcgcgcgtgatgcgctcctgacgatggaactggcccgggaagaaaaggtggaagaggtgtcgcaggacctgcgctcgctcgacggcctcaacccggaactgatcggcaagctggccgaaggcgatatccatacgcgtgacgacctggccgaactggccgtggacgagctggtcgagatgaccggtgtcagcgaggaagaagccaagtcgctgatcatgaaagcacgggaacattggttcaactgagggacacggccgggccggcctacacctggcccgggcgcgctttccgcaacgatttgtcccgacgtagaaaccaagcattgaaagggtttgaatggcaagcacaacagttgcccaactggccgcagaactgagtcgcagcgcagctgccctgctggaacaattgcaggcggctggggtgggcaaagcgacgccagaagacatcatcacggaatcggataagaccaggctgctggactatctgaagcgttcgcacggccaggccgacgacagctcccgcaagaagatcacactgaccaagcgcgaaacctccgagatccgccagtcggatggcactggcaagacccgcacggtccaggtggaagtgcgcaagaagcgcgtgctgatcaagcgcgacgaagctgcgcccgatgcccaggccgacgcggtcgaagcccaggcgcctgtcgtcgatgctgtcgaggaagctcgccgcgacgaggaagaacgccagcaggccgaactgctggcgcgccaggaagctgaagccaaggccgcccgcgaggcagccgagcgcgaggaagccgagcgccgcgcccgccaggaagcgctggaggctgaacagcgccgccaggccgaactcgccgcccgcaaggcggaggaagaggctgccgcgtcgcgcgccgtgaccgaggccaacgaggattcctcgcgcaagaaggcagaggacgagaaggcacgcgtcaccgccgaacgcgccgaggcgcagaaggctgccgacgaagccaaggctgccgccgacaaggcccgcgcagagcaggaagtcgctgcgcgcaagcgccgcgaggctgccgaagccgaggcccgtgcgatccagcagatgctgaacgcgccgccgcgcgtgctgaaggcgccgtccgagcgcaaggctgaagagaagaaggccgagcagaccggtacgctgcacaagccggtgaagccggccggtgcgaccacggaagcgaagaaggacgaaaagaagccggccaccacgaccacgaccacggcaaccgccgacaagaagggcaaggtcgtgaaggcgggctggcaggacgacagcagccgcaagaagggcagcggcctgaagacccgcggcgatacttcgggtggcgtgggcggctggcgcggtggcccgcgtggccgcggcggcaggcagcagcagcacgacgacagccgcagcagcttccaggcgccgaccgagccggtggtgcgtgaagtgcacgtgccggaaaccgtctcggtggccgacctggcgcacaagatggccgtcaaggcatccgaggtcatcaagcagatgatgaagctcggccagatggtgaccatcaaccaggtgctggaccaggaaaccgccatgatcgtggtggaagaaatgggccacaaggcgtatgccgccaagctggacgatccggaagcgctgctggtggtgggcggtgaggaacacaccgacgccgagctgctgccgcgtccgccggtggtgaccgtgatgggtcacgtcgaccacggcaagacctcgctgctggactacatccgccgcaccaaggtggccgcgggcgaagccggcgggattacgcagcacatcggtgcctaccatgtggaaaccgaccgcggcgtgatcacgttcctggataccccgggtcacgaggccttcacggccatgcgtgcccgcggtgccaaggcgaccgatatcgtgatcctggtggtggccgccgacgacggcgtgatgccgcagaccaaggaagccattgcgcatgccaaggctgccggtgtgccgatcgtggtggcgatcaacaagatcgacaagcccgatgccaacccggaccgcgtcaagcaggaactggtggcggagcaggtggtgccggaagaatacggcggcgattcgccgttcgtgccggtttccgccaagatgggtaccggtgtggaagacctgctcgagcaagtgctgctgcaagccgaagtgctggaactgaccgctccggtggatgccccggccaagggcctggtggtggaagcccagctggacaagggcaagggcccgatcgcgaccatcctggtcagcagcggcacgctcaagcgtggtgacgtggtcctggctggcagcgcctacggccgcgtgcgtgccatgctggacgagaacggcaagccgaccaaggaagccggcccgtcgatcccggtggaaatccagggtctgtcggaagtgcctgccgccggtgaagaagtgctggtgctgccggacgagcgcaaggcacgtgaaatcgcgctgttccgccagggcaagttccgcgacgtgaagctggccaagcaacaggccgccaagctggagaacatgctcgagcagatggccgaaggcgaagtgcagacgctgccgttgatcgtcaaggccgacgtgcagggttcgcaggaagcgctggtgcagtcgctgcagaagctgtcgaccgccgaagtgcgcgtgcagatcgtgcatggcggcgtgggtggcatctccgaatccgacgtcaacctggcgacggcttcgaaggcggtcatcatcggcttcaacgtgcgtgccgacgccggtgcgcgcaagctggccgagcacaacggcatcgatatccgctactacaacatcatttacgatgcggtagacgagatcaaggcggcgatgtcgggcatgctggcgccggagaagcgcgagaccaccatcggccaggtcgaggtacgtcaggtgttccgcgtgccgaagatcggtgcggtggccggctgtatggtcaccgacggcctggtcaagcgcaactcgctggtgcgcgtgctgcgcaacaacgtggtcatccacgacggcgagctggattcgctcaagcgtttcaaggacgatgtgaaggaagtgaagcaaggcttcgagtgcggtctgtcgatcaagaacttcaacgatgttcaggaaggcgaccagctcgaggtgtacgaaatcacagaggtggcgcgtacgctgtaaggcgtcgcaagcaacggcaggcttcggcctgccgttgtcatctcgaccagactgtattgaatggccaagaaaggcagtatctcctcccgcaatctccgcatctccgaccagatccagaaggacctggccgagatgatccagcgcgaactgcgcgacccgcgcctcggcctggtcacgctgcagtcggtcgcgctgacgccggactacgcgcacgccaaggtgtacttcaccgtgctgggcgccgaagccgccgaggcggaagccatcctgaacgaaaaggccggctacctgcactcgctgctgtacaagcgcctgcacatccataccgtgccgacgctgcgcttcttccacgatacctcggtcgaacatgcgatcgagatgtccaagctgatcaacgaagcgaacgccacgcgttcgaaagacgactgaagccggcgcccatgccgccctggcatgggtttcgcggccactacgtttacgttgccgccatccgcgccgcatcgccgtcccgcctcccgctttctcccgatgaccgattccaacgccaaccgtccgccgcgcctgccgcgccgcgaggtccatggtgtgttgctgctcgacaagccgctgggcctgtcgtccaacgacgcgctggtgcgcgccaagcgcctcttgcgcgcggccaaggccggccataccggcacgctggatccgcttgccacggggctgctgccgctgtgcttcggcgaagccaccaagttttcgcaggacctgctggaagcggacaagacctatgacgccgtagtgcggctgggctcgcgctcgagcacgggcgacgccgaaggcgaactgctcgacgtgcgcgaggtcacctgcgattgcgccgcagtggagcaggcgctggcaagcttcctcggcgagatcgaacaggtgccgccgatgcattcggcgctgaagaaggacggccgcccgctgtatgaatacgcgcgcgccggccagaccgtggagcgcgcggcgcgccgcgtcaccatccgttcgattgcgctgctggagtgcgccttgcccgaagccccgtcgttcacgatgcgggtgacgtgcagcaagggcacctatatccgcacgctggccgaggacatcggcgaagcgctgggctgcggcgcgcacctgaccggactgcgccggatcgccgtgggcgacctgacgctggacggcgcggtgaccctggagcagatcgagcagcgcgacgactcgcagcgcccggccatgctggcacctgtggacgccttgctgcagaagtgtgcgccggtgcatctggacgaggtctccgcagcgcgcttcctgcagggccagcgcatcgctcagcgcgacctgccggccgacaccgggctggccgaggatgcgctggcgcgcgtctatgccggcgaaccagcccggctgctgggcgtggcacgcatgcgcgaaggcgcgttgcggccggagcggctggtcaagctgtaaattgcgtgaggggcgtaaatggccgccccgtcagcaattactcgagcgtgatcttggccgtcttgatgacatcggcccacatcttgcggtcctgggcgaggaacccggcgaaatgctccggcgtatcgcccacgggctcggagccgaattcagccatcttcttcctgacttccgggttcgccaaggccttgaccagcgcctggttgtagcggaccacgattgccttcggcaggtccttcggcccgaagatgccttgccaggtcggcatgttgaagtccttcagtccgctctcggcaagcgtcggcacgtccggcaacaggggcgagcgcttgctgccggtgactgccagcgccttgaccttgccggtcttggccagcgtcgccgcggtggtgatgttgtcgaccgtcatggcgatatgcccgcccatcaggtcggtgatcaccggggtggcacccttgtacggcgcatggaccatgtcgatgccaagacggtgcagcatggtttcggcaatcaggtgatttgacgtgccgacgccggcggtgccgtaggtgacctgcggcgtctttttgacgtaggcgacgaagtcggccatggtcttgaccggcagggccggattgacgatcacgacattcggctgggtggccagcatggcgatgggcgtgaaatcatccgccttgtatggcgtgcccttggggttgagcacgtgggtcaccgccatcgcgccggcggcgcccatgccgatggtgtagccgtcggccggggccttggccagcttgtcggcggcgatattgccacccgcacccggcacgttctccaccaccaccggaacccccaggctttccgacagcggcgcctgcaccaggcgcgccagcagatcggccgagccgccgggcgcaaagcccaccagcaggcgcaccggcttggccggcttccactcctgcgcctgcgcgcccgggatcaccgccgcgcccaggctcatccacatcatgccgcgtgccagcggccccatccacttcgccacctgtttcattgttacttccactccagcagtgtcatgggcaatctgtcagcgggcttgcccttacccgaaaatggattcgcttcgtgcctggattcaggccgcggcaccagccagtacctgtcccagcagccttgccaccatgcggttggagagcagcaccggcgcgccggcatggcgcgccacctcggcccgcatggcttcggtgtagcccatgcagtgcatcaccaccaggtcgcagccgcgcagcgtctcgcccgcctgcgcgaagcgatcggtgctggcgtcggtataaggcgaggcatgggtgacgcgcagttcgcagggcaccggctggatcaggtggaagctgcttacctgggcctccagcggcaatacgatgccgagccgcttgcagccctgcgccagcgccacggtcagatggtccactacctgctgcggttcgatgaccagggtccgcatcggcggcagggcggtgccggtgcacagcggcaccagggcgtcgaagcggccgtcgtccagcgaggtcatcagccgggccagcatggcctcggccaccggcttgcccatcaccgcctgcgtgccgtcacgcagccggctggcaaagcggtactcgccgggcgcgggcgccagcgcggcaatatcttgcgggcccagcgcgtccaggatgccgaactcttccacagtggccggcaggcccaggtcggcaatcatctgcggtaccacgtctgtcctgggcgcctgcccgatggtgacgaaggccacgcgtggctggcgtgcggcaggcgtgttcatgcctcggttcccacggtctgcagatgggccagcgagccatagcggcgctgcagctcggcccactcgaccgcgtcgtagaagtcgcactggccctggccgaactgcttcgccacctcgatgcagaagcgcgtcgccacgtcgatgtcgaaggcgttggtgacgccggttgcgcagcctggcacagtggtctgcgcggtcagcgccacgcccaccaccggggcaggggtcacgatggccggctgcatgatcgagttgacgtgccacaggccgttctcatacggcgtgatgtcctgggtggtcaatggcaacaccatcggcagttcgccgctgacccatcccatcaggtccagcatccgctccggcaggcgcagcagccagccttctttggccaccggcgtcagcgccacgccgcggcggttgacaaagcggttgccgcgcgtggtgtcgaccgacaggatcgccgccatgcgcgggtgcacctcatgcgacatcatcgtgcgcatcgcaaagggcgatttcatcatcggcaccggatgatgcggccgtgtggcggcatgcgggcagatatgggtgtggatgcgcaccggaccggccagcacgtcgccggtggcggccatgtcggccagcttcaacgcgctggcgacggccacgatggcgccgtcggcatcggacaccagtcccgtcacggccgggcgtgcaccgacgccgcccagccggcccaccacgccaagtgcgggcgcgtccgggttctgtccgggcaccgtgcaggcgaggaaatcggtgtagaggccgttctcttccacgcgcgtgacggtgacatcgtccaggccgcgcgagcgcagcagtgaggcgacggctgcgccgtcgacattcgctgccgacagcagctcgatcgattcaataacctgcttgatagacatcttgcttgacttcctggggctggggtggggttctgtacgcagggactcaggccggcaaattcagcgcggcagcgacagcgcgccgggctgcacgtcggcaatgtccgcgcccctgaaccagcgcgcgggatgggcgccgcccatttcgaggcgatcgtccgagacccgcacccagttgccttcgggcagccccagcactggcatgtcgggctgcagcacggtgaattcggccaggcgctggtcgcgcgtttcgccgcggaagccgggcacgaccaggttgaagtagtgcgggttgatctggaaggggaccagcgccagcgcgtccaggccgcccgggtcggccaccggcatgtcgttggtggtgctgatggtcgggcaggccaggttggcgccagcgctccagccgatatagcgcgccgcaccggatcgcacccgcgccgagatcgccgccagcaggccgcgctcgcgcaggcattgcagcaagcggaacgtgttgccgccgccaacgacgatcagttcagccgcctcgatggcgcgcacggctgccgccggctcggcctgccggtgcagcgattgcaccgcgatgccgaccggcgcgaaggcgtcgcggaccaacgtctcgtaggtgtcccagtcgcgcgtgaccccggcgaacgggatgaagcaggcagtcttgcggccggcggccaggtcccggattgccgcctgggcgtggaccaggtagccggcgtcgctgctggagttgctgagtaacaggagttccataagtcgttgcggcgaagtctagataagtggggtggcgtcgagccacagtgggtcgccgatgcgctgtcccacgggtgccacggcctgcaccagcgtcgcgcgcagcgcctgggcctgggcctggctgacctgcatcgcggtgaaagacaggcacagcccacgcacgtcgcctgagagcggatctgccagcgtggcggccacggcgccgatgccgggcatgccttcattcacggcgatggcgctgcgctcggcgcgggccgtcgccacacgctcgcgcagctcggcgaccgtggcgggacagcctgcgggtgcatccggcagcttgcgggtgccggcggcgccatagcgcgagttgaattcaggctcgggcaggcgcgacagcagtacccggcccatcgctgtggtgaatgccggccggcgtgcgccgggcggtgacagcacctgcaccgggttgcttccgttcaggcgttgcagcacgacggtgtcggtgccgtccagcatcgacaggtaggcggtgaagccggtggcatcggacagcgtggccaggatctcgcggcattgctcgtcgaaaggatgcgcctgtgcagcagcctgcgcggcgcggatcagcagcgcgccagggcggtagcgccgcgtggacggctgcagttccagcaggcggtagcgcaccatctgggcgagcaggcgcgaggccgagctcttggcaaggccaagttcgtccaggacatcgttaaaagtgatctcgtgccggtgatgcccgaacatgtccaggacgctttccacgccttcaagaatgctcactccgccgctccatgctccacgtcttcttacctgtttatggttccattttttggaaccaaggttccgtaaattggtttgcaaataatagaggcacgaagacaggaacacaagggggacattcccggcgcggcaacgccgcggcgaagcaaaaaaaaacggccccgatcaggggccaagttcttgaaaaccggagaggtggggtcagtgcgccgccaacgcatccgctgacccgccgccgcccttggccggccgcgtcagccagacaaagccgatcagcacgaagaacagcatccccgagatccagaagatatcgttggcgccgagcatggccgcctgctgggtgatattgcgctcgatcacgccgatcgcctgggcctggctcatgcccatctgcatcaggtggttgagctggtcgtggtaggccgggttgtacggggtgacctgttccaccagttgcgcatggtgcagcgccgtccggttttcccagagcgtggtcgaaatcgaagcgccgatggccccgaacgtgatccggacgaagttggacagtcctgacgccgccggaatcctttccggcggctggcccgacaggatgatcgaggtcaacgggatgaagaacatcgccatggctgcgccctggatcagggtcgggatcatcagcgtgcgggtgtccacctgggtcgtgaagccggcgcgcatcaggctgacgatgccgaaggtgatgaacgcggccgtggccacccagcgggcatccattttcggcaggttcttgccaatcagcggcgacagcaggatcgcaaagatccctaccggcgccatcacgatgcccgcgtccgtggccgtatagccgacaatcgtctgcagccacagcggcaggatcaccaggttgccgaagaacagcccgtatgccacggagatggcgaccacgccggcgctgaagttgcggcccttgaacaggctgatatcgacgaccgggtgcttctcatggctttcccagatcaggaagaacaggaaaccgacaatcgccaccagcgtcagcaccacgatctcggtcgagtggaaccagtccagttccttgcccttgtcgagcatcagctgcatcgagcccacccagatcaccagcagcgccaggccgatgcggtcgatcggcagcaccctggtcggggtttcgcggtccttgtagatggcccaggtgacataggccgtgacgatgcccaccggcacgttgatgtagaagatccacggccaggtcatgttgtccgagatccagccgcccagcagcgggcccatgatcggcgccaccagcgtggtcatgccccacagtgccagtgccatggtgctcttctgcggcggatagctcgacagcagcagcgactgcgacagcgggatcatcggcccggccaccgcgccctgcaggacccgtgcggccagcagcgtctcgaggttgggagcgacgccgcacagccacgatgccagcacgaacagcaggatcgaggtgatgaacagccgcaccgcgccgaagcgcgtggtcagccagccggtcagcggcaccgagatcgcattggccaccgcaaacgaggtgatgacccatgtgccctggttgggcgccacgcccaggtcgcctgaaatcgccgggatcgatacgttggcgatcgacgagtccagcacgttcatgaacgtggccagtgacagcgcgatggtgccgaccaccagcttgccgccggtcagcggctgcggctgctgcggtgccagcggccggacgggccgcgccggcgcctggctgccgccggactgcgcggcggagggggagatggccatggtcaggtgttggcgggcttggcgttggcggcgctggccgagggcaggccggtgctgcggccgccgttgttggcggcgatgatgcgcgcgatcagctggtcggcgtcctgcgcaaccttgtcgtagacatcggtctgcatcggcttggccggcgcggcaggggccatggcggcgccttcctcgcggcgcacgtcgaccttgacggtcatcgacaggcccacgcgcagcgggtggtccttgagctgctgcgggtcaagcgcgatgcgcaccggcaggcgctgcaccaccttgatccagttgccggtggcgttctgcgccggcagcagcgagaaggccgagccggtacctgccgagaagcctgcgaccttgccctggtattccaccttggagccgtacacgtcggcttccagcgtcaccggctggccgatgcgcatatgcgtgatctgcacttccttgaagttggcgtcgacccagacctggtccagcggcaccacggccatcagcggcgcgccggcggccacgcgctggccgacctgcaccgagcgcttggcaacgtagccggtgaccggcgccggcatggccgagcgcgcgaacgacaggtaggccgagcgcaggctggcggcggcgcgctgcacgttggggtgcttctccaccgtggtctggtcggtcagcaccttgttcgacgccagctgctcgcgcgcggccagcagcgccgactccgcacccttgagcgcggactgcgcatgcgagatctcttcattcgagaccgcgcccgagccggcgatggcctggcggcggcgcaggtcgtcgcgggccttggccacgtcggcttcgcgcagcgccacgttggcggcgagcgagccgttgttgacgtacagcgtgcgcacttcgcgcacggcctgtgccagctgggcctcggcctgttccagtgccacttgcgaatcggcgcgatcaagctggatcagcggctggccggcggtgaccagctgcgtgtcgtcggcggagatcgacaccacggtgccgcccaccagcggcgtgacctggaccacgttgccggcgacataggcgtcgtcggtgttttcaaagtggcgggcgtacatgccccagtaaacgccatagccgatgccggcgaccacgattgccgcggtcagcgacagcagcatgcgcttgcgcttgccgttgttgttggtggtggccggcgcttgctgggcagggtgctggggggcgttggtgccggccgcttgctggttgttgctcatgatgtcttctgaataatcttgtcttcgatcactgggtgcgcggatcagccgcgggcgcccgcctgggtgttgtgctgttgctgcgccggtccgtggcccgcgctctcgtggccttccgcaggctcctcgtagccgccgccgagcgccttcatcaggcccatctgcaggtccagccggcgcgcctgcaggtcggtcgccaggcggcgctgctgcagcacattgctctcggcgttcagcacggtcagctgcgtgcccaggccggccttgtagcgggtggtggccagcgcataggcgtgctcggccaggtccagcgcttcgcgctgggtctggatctgcttgtcgacgctgcggatgctggtcatggtgtcggcggtctcgcgcagcgcatcgaccagggcctggttgtagttggccacggcgatgtcgtagccggcgtacttgcccttcaggttggcgcgcagcttgccgccttcgaagatcggcaggcggatggtcgggccgatgccgaaggtgcggctgacgcccatcagcaggttggacggatccagcgcggccaggccggcaaaggcggtcaggctgacgtcaggcaggaactctttcttggcgacactgatgtccttggacgccgcctccacgcgccagcgtgccgccaccaggtccggccggcggcccagcaggccgatggtcaggttgtcgggcagcgtcggcgtggcctgcgccagcagcaccgggcgctggatctgcaggccgcggtccgggcccttgcccagcagcgctgcaagctggttgcgcgccagggcgatttcctcgtcgacgcgctgcaggtcggtgcgcgaagcagccaccgtgccgcgcgcctgcgtggtctcgacctgggtgtcgaggccggcggccaggcgctggcgcgacagctcggtcaggtcgctgcgctgggcgatggcgcgctctgccacgtcgtgctgggcatacagcgcagccaggcgggcgtagttgcgggcgatcgaggtggccaggatcaggcgcgaggcctggctttccgcctcggcggcgcggtcgtcggagagcgcggcttcgagcgcgtcgcggttcttgccccagaaatcgaagtcataggacaggcccacctgcaggcgcgactggttctgccacgatcccgccagcggggtgccttcgaacaggtctttctcggagaagcgctggcggatcaggctgccttcgaactcaaggtgcggatagagcgcgctgcgggtggcatcggccatggcgcgcgaggcttccacgcgggcgaacgcggcctgcaggctcgggttgtccttgaccgcctcatcgaccagggcgctcagctgggggtccttgaactgcgcgacccaatcctgcgagggccactggccatgctcgtcgggcaaggtctgcgaggtggccatcgtggccgggtcggccacggtctgcgtgctgtgcgaattgccaagggccgcgcagccggccagcaccgccacggccacggcggtcagcgccagtgtgccggcgcggcgcacgagcgcgcttgtgcgggctggctgggaggcttggggagtgagagctggtttcatgatgacgctccgttgccggagccatgctgtttttttctacgggctgttgcggggtccggttgaccggacgttctggcttgccggaagccggcaggcacgcccgctacccgctgttgttttcgatgatccgtcgcagcatgctgcgcagcagttggatctcatcctcggaaaaaccgcggaagtggtgggcaagcaccttgcagaagatggcgggcagccgttccaccagttcctggccctgtggcgtgaccgacaggtcgaccacgcggcggtcggcgtcgcggcgccggcgttcgatcagcccgcgcttttccatgcggctgagcaggcgcgtgaccgagcccatgtcggtattcagttcgcggcccaggtcggtgacggtcgaggcgcggccggtcgccagcatcatcaggcagctggcttgtgcctgcgtgatgtccaggctgctgacttcctgctcgaccccgtgcgccagcatgttcctggcgcgctgcatcaggtagccgacgctgtcgcacatctggtactgggcgggatcgaacaggccggccgtggattcggctggttgatcggaggaagggagccgtgacatctttgcctttgcaatctttgctgaggcaaatatatgttcacgtttaacgataagcaagaacggaaattggttattccacttttcgcaatgatattcattcggtaagtggcggttccgatcaacgcgtcttgcgctgcaacatgctagaatgttgggttacctcagattctccaaagcgagacgcagcaatgacccgcgccatccgaaatatcgccatcatcgcccacgtcgatcatggcaagaccaccctggtcgaccagctcctgcgccaggcaggcaccttccgcgacaaccagcaagtcgccgagcgggtgatggactcgaacgacctggaaaaggaacgcgggatcacgattctcgcgaagaactgtgccgtcgagtacaacggcacccatatcaatatcgtcgacaccccgggccacgccgacttcggcggtgaagtggagcgcgtgctgtcgatggtcgacggcgtgctgctgctggtcgatgcggtcgagggcccgatgccccagacccgcttcgtcacgcgcaaggcgctggcgctgggcctgaagccgatcgtggtggtcaacaagatcgaccgcccgggcgcgcgcccggactgggtcatcaaccagaccttcgacctgttcgacaagctgggcgccaccgacgagcagctcgacttcccggtgatctacgcctcgggcctgaacggctttgccggcctgaccgaagacgtgcgcgacggcgacatgaagccgctgttcgagaccgtgctggacaaggtgccggtgcgtgacgacgatcgggacggccccctgcagctgcagatcatctcgctggactactccagctacgtcggcaagatcggcgtgggccgcatttcgcgtggccgcgcccgtccgctgcaggacgtggtggtcaagttcggcccggaaggcaacccgatcaagggccgcatcaaccaggtgctgaagttccagggcctggagcgcgagatcgtgtccgaggccgaagccggcgacatcgtgctgatcaacggcatcgaagaactgggtatcggctgcaccgtgtgcgcgccggaggcccaggacgcgctgccgatgctgaaggtggacgagccgacgctgaccatgaacttctgcgtcaacacctcgccgctggccggccgtgaaggcaaattcgtgaccagccgccagctgcgcgagcgcctggaccgcgaactgaagtccaacgtggcgctgcgcgtggccgataccggcgacgacaccatctttgaagtgtctggccgcggtgaactgcacctgaccatcctgctggaaaacatgcgccgcgaaggctacgagctggccgtgtcgcgtccgcgcgtggtgttcaaggaaatcgacggcgtcaagtgcgagccgtacgaactgctgaccgtggacgtcgaagacagccaccagggcggcgtgatggaagagctgggccgccgcaagggcgaactgctcgacatggcgtcggacggcaagggccgtacccgcctggaataccgcatcccggcccgtggcctgatcggtttccagggcgagttcatgacgctgacgcgcggcaccggcctgatcagccatatcttcgacgactacgcgccggtgcgcgagggcggcctgggcgagcgccacaacggcgtgctgatctcgcaggacgacggcgacgccgtggcttacgcgctgtggaagctgcaggaccgtggccgcatgttcgtcaagccgggcgatgcgctgtacgaaggcatgatcatcggcatccacagccgcgacaacgacctggtggtcaacccgatcaagggcaagcagctgaccaacgttcgtgcttcgggtacagacgaagccgtgcgcctggtgccgccgatccagatgtcgctcgaatatgcggtggaattcatcgccgacgacgaactggtcgagctcacgcccaagagcatccgcctgcgcaagcgccacctgaaggagcacgagcgcaagcgtgcttcccgcgaaggcgcataagcgctgacgccggcaataaaaaaaccgcgccccgaaggcgcggttttttattgcgtgccgggcagcggctccagtgccggtgcgcgcgggctgcgccactcgggcggcttccacaggtagcgcaggtcgcgatcgcgccaggcatcggcgaacatgtcacgccattcgtggaaggtcagcgtcagcgggttatgggtgcgcacctggcgggtgatgccgtacaccggggcctcatgctcggggacgaaggtgccgaacaggcggtcccagatcgtcagcacaccggcgtagttgcggtcgatgtactgcgggttcttcgcatggtggacgcgatggaccgatggcgtattcagtagcgactcgatcagctgccagcgttgccccagccgcgtatgcacgaagaactggaaggccaggttcacgccgaccgccaggatcacccagtccggcgtgaagccgatccatgccagcggaatccagaacagccacatgcctgagagcggatacgtcaggctctgccggaacgccgtcgagaaattcatgccttccgacgaatggtgcgtcacgtgcgaagcccacagccagcgcacgcggtggctggcgcggtggaaccagtaatagagaaagtcctgcagcagcaatagcagcgcgaatgaccacagggtctcgggcatggcgcgcaggccgtgctggtagcaccaggtatagaccgtgcggatcatcagccagaggaagaacgcatccgaggcctggtgcatcagcgccagcgctgcgttggatacggtgtcgcgcaggctgtagacggtcgggtcgcggcgggcccagtaccatgcctcggcgccgatggtcagcaggaacactggcgcaaaggccagcagcaccagtccgggatcgagcgattcagtgttcatgccgccagtttgcatattccgcatggaattgccacgagggactcctccaaacggcgctgcgcggggtctcgcggcgcatccgccacatggtggattgctgtactgccacgcaattctgtcacgcgtgtgaaggtggtgaataccggtaaaggacgcagccagcgtgccgtagttgaacagggcggcggcgcggctcgcgctcccgatttccccgattcctcttcccccggagccttcatgttcaagaacactaccatcggagccagattgtggttcctcaccatcgtcacaaacttgttgttgttgattgtcggcgcagtgggttggctcggcatgtcgcgcagcaacgaggcgacgcaccagatctatgggcagcagctgtcggccgcggtcaacctggccgaagcgcgttcgaaccagctgctggtgcgcgtactgctggaccaggcgaccttcgccacggaccccgccgatgccaaggcgcgcgccgcgaccgcggaaggctttgcgcgcgattcagagaaggcctggcaggcctatctcgccttgccgcgctcggctgacgaagccagggcggtggaggatgtcaccgccaggcgcgatgcgctcttcaagcagggtgtcgcgccgatgatcactgcgctgcatgccggcgaccgcgatggcgtgatgaaggccgtgctcgaaaccatcccgcagctcgacatcgccttcaccgccgtcaatgccgaactgaacaagctgcaggtggccagcgccaagcaggtctacgaggcatcgcagcaacgctatcgcaacctgttcgcgctgtcggcatgcgtgctggcagtgggcctggcattcagcaccgtggtggcatggcgcctgcgccgttcgatcgtgcagccgctggatactgcgatcgggcgtttcgagaagatcgcgggtggcgacctgagcgtcgccgcttccggcggcgaggtgctggccgatgagtcggcgcgcaacgagaccgcgcgcatgctcggcatgctgggacggatgcaggccagcctggtggccatggtgggcgacgtgcgtggcggcgcggactcgattgcctcggccagcaagcagatcgccagcggcaacgccgacctgtcgcagcgtaccgagcagcaggcggcctcgctggaagagaccgcctccagcatggaggaactgaccagtaccgtgcgccagaatgccgacagcgcgcgcgaggcccgcgggctggcaacggatgccgcgagcctggccgagcgcggcagcgaggccgtgctgcgcgtggtcaacgtcatgcaatcgatcgatgccagctcgggcaagatcgtcgacatcatcgacgtgatcgagaaggttgcgttccagaccaatatcctggcgctgaacgcggccgtggaagccgcgcgtgccggcgagcacggccggggatttgccgtggtggctggcgatgtgcgcgacctggcgcagcgctgcgccggcgcatcgaaggaaatccgcgcgctgatcggcgcctcggtggccaatgtgcgtgagggctcggggctggtcgatgacgccggtcgggcgatgcaggacatcgtcgacgcggtgcagcgtgtcagggccatcatcggcgatatcagcgcggcctcggacgagcagtccaacggcatcgagcaggtcaacgtggcggtgtcgcagatggacagcatgacgcagcagaatgcggcgctggtggagcaggcggccgccgcggcggcatcgctcgaagaccaggcgcagcgcctgacctcgctggtggcgacgttccggctggcgtgacggtgccgggcgcatgcgcagtgactgcacatgcgcagcaagctgcccacaggggtgcgcttgccgatgcgactggcgtaaaatcgcgagttgcattggaggagtacgacatgactgaattcgtcacgaccgaggtccgcggtggcatcggatacctgacgctgaaccgcccgcaggcgctcaacgccctgtcgctcgacatgatccgcgccatcacccaggcgctgcagacctgggccgccgcacccgaggtggcggccgtggtggttgccggtgccggcggcaaggccttctgcgccgggggcgatatccgctattttcacaaggctgcgcacgaaggcgatccgctgctcgaccagttctttgtcgaagaatacgcgctgaacttcctgatccaccgctatgccaagccctatatcgcactgatggacggcgtggtgatgggtggcggcatgggcatctcgcaaggggcgcggctgcgcctggtcaccgatcgcaccaagatggcgatgccggaaaccaatatcggcctgttcccggatgtgggcggcggctggttcctcgcgcgcacgccgggccgcatcggcgagtacctggggctgaccggcaccgtgatccatgccgccgacgcactctacgccgggctggccgacgcctatctgccgcgcaaccggctggccgagctggtcgattcgctgcgcacgcagcagtttgccagcggcgacgccgtgctggcgcacatcgaaggctttaccgctgcgcaccgcgatgactgcgtgccggcgcaaagcacgctggccgggttgtcggcgcagatcgacagcctgttcgcgggcaacaccatgccggacatcctcgccgccgtcagcgacgccccgggcgactgggccgcgcagaccgccgccatgctgcgcagccgctcgccactgatgctgtgcgtgacgctggagcagatccgccgtgcgcgcagcatgtcgctcgaagacgagctgcgcatggaactggacatgatgcattacgtgttccgcaacggcgacggtgtcgagggcatccgcgcactggctgtcgacaaggaccacaagccgcgctggcagcatgcgcggcttgatgatgtcagccgcgagaaggtgctgtcgttcttcgacagcccgtggcgcgccgaggaacatccgctggcgtcgctcggcaagactgcctgacatccgctgcgcaggacgtggcggcgccgactcgggtagagtgacggctggaccggcgcacgcggccaggccaaccctggccgcgtgcgccgtccgcgtcattccgtccacacagtcaaaggagccgcaatgagtaatcctcgtgatgtcgttgtactggtgggaagcctgcgcaaggagtcatacaaccgcaaactggccaaggcgctgatcgcgctggcgccgcagcaactcaagctggagattgtcgagatcggcgagctgcagctgtacaaccaggacctggacgacaaacctacccaggcctggaccacgttccgcgaccgcgtccgccgcgccgacgccgtgttgttcgtgaccccggaatacaaccgctccgtgcccgcgccgctgaagaacgccatcgacgtgggctcgcggccctacggcagcagcgtctgggacggcaagcctggcgccgtcatcagcgcttcgcccggcgccatcggtggcttcggtgccaaccagcacctgcgccagtcgatggtgttcctcaatgtcccgatgctgcagcagcctgaggcgtatatcagcggcgtcgacaagctgtttgatgagcagggcgggatcgccaatgaatcgaccaagggctttctcggcaaatttctgacgacgtttgcaggctggatcgagcggactgcgccgcggtgatactgcgggggccgggcgctgtgaacctcgacgcggtagcctgtaaccgcggtttggggggacgtgtcaggttacgaaggcgtgcgcatccgccccggctcctgtcagcgaacgttcagaggtcgagtcgagaaccatcgagtgccatccatgcccagaggagaagcaccggcatcccggccagccagcgcagccaaatgctgcggttcattgccagcaacgcccaaattgcaagtgagtaaccaagcaggagtgcgaagcacgacagcaggtagttcgcctgtgattgatatgcccacatcgccgcagatggtccttggccgccgaacggatagttttcagggcctgtccaggctccccgtatctctacaagcatcagcatggcgacgagaccgaggatgccggaaccgacagccttaatagcgaacttccagttccatgtctttcgcatagtacaaaaactccttggcaaaggagttcattgaactggtgaagtcgatgcaacctgcagagccagggtagcttccgccgtggatcgtgaaattgcttcggccaaacacgtttgtccccggcgtggctgcaacccaatgcgccgggttccccaggctgtcgtacagcccggccatcgcccggccttgatgttgatgagcctgagaatgcaggcagcatctgttgaagatgcttgtaatttcccagtgttgaaaatcatcctgccgcgcggtggtgcggggcccctgtcaggggcgggcgcgcacgttcccatttgcacgcagagggcttcgggaatcaatcagcgcagtccgaatgtgcatgttatctgtgctgcacgtcttctatagcccagttaagccgtgcacgtggagtgatgccaaggagccgtttcagcatcgcgagtgcacctgtgttgcttcgatcgatctcgatctgccctcgatggtaaactcaagcgcttccgctcatcagcgaacttgccgtttcccgacaggctgacgaggcagtttttgagtttttctaagtaggaatatcggtccaggcggatcgttgtgaaatgactgattatcaagggaagatcgctgctgcaagcccgcgccgggtatccgtggccccgatgatggactggaccgaccgccattgccgcatgttccaccgccagctcagccgccacacctggctgtacaccgagatggtgaccaccggcgcgctgctgcatggcgacgtcccgcgccacctggacttcgatgcggccgaacacccggtcgcgctgcagttgggcggcagcgagccggcagatcttgccatggcggccaagctggggcagcagtggggctatgcggaagtcaacctgaactgcggctgcccgtccgagcgcgtgcagcgcggggccttcggcgcgtgcctgatggccgagccgcaactggtggccgactgcgtcaaggcgatgcgcgatgcggtggatatcccggtcaccgtcaagcatcgcatcggcatcgacaagatcgagcactacgattttgttcgtgatttcgtcggccgggtggccgaggcgggttgcggcacgtttatcgtccacgcgcgcaatgcgatcctgaagggcctgagcccgaaagaaaaccgtgagattccgccgctgcgctatgaggtggcgtaccagctgaagcaggagtttcctgagctggagatcctgatcaacggtggcatcgtcagctatgacgaggtggcggcccacctcgagcacgtcgatggcgtgatgatcggtcgcgaggcataccatcagccctatgtattggccgaaatggatgcgcgcttctatggcgatgcgagtgcgccggcgccgtcgcggctcgatgtcgagctggcgatgcagcgctatatcggcgacctggtggagcggggtggctatatgggcgcggtcacgcgccacatgcttggcctgcatcgtggcatcgcgggcggacgtggctggcgccgcgtgctgtcggatgccaagcgcatgaatgcggcacgcacgcgagccgatgtggatgcactgttcgaagaggcgcgcgcgcacttgcggccgcaggcacaagagcctctggccgcgtaagcgagcgtgggctgcgcgttctgccgaggccgcgctctaactccgaatcgtgaaaatgtgcatggctgcgcgggggtaccgcgcgccgcacttgcaatgcctgatcgcccggaaaccggcgccaggaaagggattcccctaattcgctgaggcagggcactttcatacactgtgcctgccctcgaatacagggctttcttcaactgattattagcccgcttcggcgggcttttttttcgtcgccgtactcttgttgctacgccaggcttgttgctcttcgtttacccgaatggtgcattcccaggatgacagttacagtgcaaccgccttcagggcatttgagatcgctaaatttaagagtccgcgctgcggactctttttttgcgcgctcgctttgcttgcgccgacgaggggattagacggttgtccccgtaaagagttccatcggtcacgccagcaggctagcgcgtatggctgatgcctacgtccagcgtgccgtacgtcgtgatgctcgattccctgccgtcgaccccgccgccagcgcatccgccgagcaaggtggccgccaatgccgtcagcgcaagaatccgcgctggccatctacacttgatttgcattcccgtttcctgccgttcgtagacgtgtcgatttttgtcgatgacgtcgattgggctctcagatgctcgtgaggttccttcgccaggtgctggcgccacgacaatgagaaggcagggtggccaaaaagaggcaggcggcccgatggggcgggccgcctgacgggaaggtcgaggggggtcaatgtccctcaggcacaagtatcgcttcgcgcatttgcggcatgaaccctgcagaggtaggggctgtgcacagcatatttccgcgagcgaatcagcggcaggcgcgaaggtgccagcgccgggcgggcgccctggtcggcggccgtgatacgatccctcgcatagccccaggcgagacaaggcatggcatgcggaccgagccggcagggggagcagcgtggaaaaagaaaacgtggaaaacgaagcgccgttcggcgttgtctatgaagacttcagggtgatctgggttgccgagcaactgcaggacggcaaatggacggcacgctactgctggcatcccggcacttcggaagctgctggcaaggcgttgcaggaagccgtgctgaacggcaagtcgcgccgcctgttggggcagttcgataccgaagcggagaccgtcgaagccatcaagcaggcagtgctgcttgaagcaaagtggagcccgtccagaacctgagcttttctctcaaaaaaattgtgcggaatactagccattccggcaaactgtttgtataatcttggttttcgtcgatcagcaacgtaacgcgctgatgacctctacggtggctgtagctcagttggtagagtccaggattgtgattcctgtcgtcgtgggttcgagtcccatcagccaccccaaattttctttcgcatcaaggccttacgggctttctaaccgtcccatgatgcggaatttccccacggcgccactggtgccgtttctgttttctgctcccttattctgttgctgctgcccgtttgaccttgcgccgatcgtagtgacggtgggtggtcgatgggttggcgtgtgccgcgaagtcgtaggcgtcggcggacctgcgctcgagcttcgtggtgatcgccgaagtggacctcgtatgccttcagggttgtcatgctgcctccctagcggcgagcatggcgtcggcctcgatgtagcggaggcgggcacgcgcatcagcccagaagatcgcgttggctagcgggtgggcggcgtagtcaggcatggcgcggccgagcagttgctccgcatagcggacgccgatttcatcgccaacgacaaccttcgcggcgaagtagtcgcgaagggtcatgccgccaactatctcgttcgggtagtccctgttgaacgacgtgggaaatgccgagccgccgttgtcgatgtcggtactcacccgccgccgcatgccgacgcgccaggacatcgccctggtgcagaagacgcaagccgacatcctggatctctggtcgcgcggcctggccgagcgcgacaagggcattcaggaccgggcgtcagcctggctgcatagctggaacgaaaagaacccggaatcacccatcctgatcaacgggcgccagttgcagagccgcgtcaagcagatggcgacgccgagcgcagatcggatgttgaaaggggcgccgaagggtctgcgcggccgggtggccggcgagttcgctgctggccgccccgcgaaggaggggagtgatgaagcgctacttctgaaacgtgctgatcgccgtcgaccaactcggcaacgcgctagccgccggcgacccagacgagacgatcaggcgtttcttcccagcaagcatgccggcgctattcttcgtcgcgctctggattggttccatcgacccggctcaagtaccggtgcattgtcccgtctagcctgtgaacgtagagatcgacgcgttcggcacaggcggctgtccagccgtcacggacggcgtccgctttcgtagtgaacgggatattcggactgccgtctcgacagatgtcccaatggccgagatgcggcatgatgtgaacgtgtcgcattttgggacccccgcatcagtatgcaattcgagtctagggcctacacatgagcaatcaatgttggacagatgctcaatcgggcctgtctggcaaaagaaaagccctcgaccagggtggcgagggcccgaagtggaggcaggcgtgtcgcaggaccgcccacttagaatccaactgagggcatgaccttaatcggcatcacggatgcaagtgagcgcgctcgcgtcgcaatcgcgaaaatcgatctcacttggctcgttttccacgccatggatcgtgaggacggcatcctgcgccattgccatttgaacgcctgcggcaatcgctgcgccgcgggagggataggttacacgcgtgccgcttggatcatcggtttctacggcccatcgggattcttcggtcagcacaacctggacggtattgacagacattaatgcacctccttggttggggcatgtcttcgttgtaggcgcgatgagtcgaactcgatgtcgggcaacctcctaccttcgtggatggagatggcaaatagctggtcagaggcgcattcgtgtcaggaaagcgcgctatacgttgtgcaaaaccgccgatccgtgcaaaaaagccctcggtcgggtcgagagatcgaagggagggtgtattcgagccgtcgtcaggcgccggtgccaacatggcgttcctgttctcagaggcctatgcttaactcagtcttctgcacgctaaccgcgatgaagcgccacgtttctcacctacccggccacccagaactccccgtgcacggcgcgcgctattacttcgcgctggttgctgggctgatcattctgggcgggctgtacctcgccgtcgcagtgtagcgagctcgatgcattgcagtcaaagcgcaggaacaagcggtcccacgcctgtcgtggatgtcccggttgcctctgcagtttggggcgatgctcagcgggagcgaaaaatgcaagcgatatttgccagaggctacacgcaacggcccgtgatagtcgtggcccgagaatacgcggttgacggtattcaagttgacgtgggagatctagtgaccgttcgcgtccttgatcaggatgtcgagtttggcatccgcctatccggtcccggggacggcgtggacagctggcggggcacgatttttcatattgcgcgcggtgaagaggcgcttacgtatgcagaagggcttgagcttgacgacatcgtggatgtctcgcgcgcggagatggccgagatcattaagcacaacgacgattcccgatctgtttcggctcgctcgatcccggatggcggcgtggtgtaagccatgacgccggcggtctccggcacgctttagatcactgcttctttccgccagatctcggccacagtggtcatcccctccttgctccgccatgcaaaaatcatgcaaaaaagccgcgtacaaggcgggctacggaaagtttgcgccggtggtggtcgggtatgtctcgggggttgctgcaggcaaggggcgccgttggcgggccaaaaattgaggtggcgcatggggctcgcacgggttacaatttttcccacggcacccgtagaagccgcatgaatgcttgtgaaaaattgagcgttcatgggaaaaaaacgaggccgaaagcgttgattccaaaggggaaaatggcgattgatgccgggattgagattcctgtcgtcgtgggttcgagtcccatcagccaccccaaagcatttcccagaacggcgcctcgcgagggcgccgttctgcatttcccgggggcggtatgtctgttcgagcggcagcggttggcgtagcgatggcagccatggtggcagggtgtgccaccggcacttctgaaaaggacattcgcgcgcgtgcgccgatgcgcttgttcacgcccgccaagatgggtgaggttgcgaaatgcctgcgcaacaatctgggcgatgacgccgcggtcgtcaactatccggcgaagagccagaccgagatccgcatcggccagaccacgtctggcggtgaataccaatacgcctatctgatttcgctgacggcgaagccggatggtacggcgctggagctgcgcaagagcgatacgtggttcccgcagctgacgccgacggagctggaagccgaagccaaggcgtgtgcgccgcgtagctgaggacggcgcccgcagctgctcggagacagccggcagatttcaggcggccagcttttcggcggtttcgagttcaagcatgcggcagatcgccgccatgctgccgaccatggtgcggcgctgcgtaccctggtagacgcgtacgcccttgctctggcggaacggcacgggcttgaccgggcgacgggcggcgacttggtggatttgcggcatggtggcacctcttttaggcaaagcggggtcaacacccggcaagccgggcggcgtctgcaaagcaatggaagcgggtgggcccgcgcaggcggttggcctgcggtgcccggctagaagccggaagatcggatcagcccgacggcgatgccttccagcgagaactcctcgccaggctccacgatgatgttggtgaagtccgggttttctgcgatcagttcgatatggccaccgcgccgctgcaggcgcttgacggtcacgtcatcacccaggcgcgccaccacgatcttgccgttggcggcttcgctggcgcggcgcacggccagcaggtcgccgtcgaggatgccggcatcgcgcatgctcaggccgcgcactcgcagcaggtaatcggggcgttcgtcgaagaccgaggcgtcgacctggtactggcggtcgatatgctcggcggcgagtatcgggctgccggcagcaacgcggcccaccagcggcagcgtcagctgcatcacgccggccatcggcaacgaaaactggtcgggcatttccgaatcgctgtgtgccaccttcaggcggatgccgcgtgaagcgcccggggtcagttcgatcacgcccttgcgtgccagcgccctcaggtgttcttccgcggcattgggcgaggagaagccaaactctgcggcgatttcggcgcgcgtgggcggaaagccggtgcggcggatcgtgttgcggatcagatcgaaaatctgctgctgccggggtgtcagggtcgccatgggatcgccgttccgtgcggggccgcggggtttcgggtaagaggatcggtcgatcctttatcctgcatccgtctgaccgggcactgtatgtttaaacagtatgctgtgattttatacagtatcggcctgagcgcaagcagaatttttggggcgtgtctcatggacggaatgcggatcaccggcgagagccgcggcgaggcggggcgcgcccgttacaatcggcattcctgcctttccactttctttgcacgctccatgacccaattgcctcgcatcgtcgtactggccaccggcggcaccattgctggcgcggccggaaactctgccagcagcgcacgctaccaggcggcgaccgtgccggtgtcgtcgttgctggcagcggtgcccgcgctgcagtcggcggctcgcatcgaggccgagcaggtggcccaggtcgacagcaaggacatgaccttcacgctctggcaaacgctggcggcgcgggttgagcactggtccgcgcagcccgacgtggctggcatcgtgatcacccacggcaccgatacgctggaagaaactgcgatggcgctgcacctgacgcaatcgtgtccggtgcccgtggtgatgacagcggcaatgcggccgtcgacgtcgctgtcggccgatgggccgctgaacctgctggatgcggtgcgcgtggccgctcatcccgatgcgcgcggcaagggtgtgctggtggtgctgaaccagcagatccacgctgcgcgggatgtggccaaggcccacacatcggcggtggacgcctttgtctcggcctgcgggccgctgggtttcgtgcaggacgactacgtgcgcttcgcccgcgcgccacgcgcggcctgggtgatcgggccgatgccggcggcgtggccgatggtggagatcgtggcgagctacgcgcagccgggcagggtggcagtggatgcgctggtccgcgcgggtatagccgggctggtggtggctgccgccggcaatggctcggtgcatgaggtgctggccggggcgctggccgatgccgctgccgcgggggtggccgtggtgcgcagttcccgcaccggggccggccatgtggcgattccgccccagctcagcccgacggatggagcttttgtttccgcaacggacctcaatccctataaggcgcgcgtgctgctggccctggcgctggcagccgactcaggcctggcgcgggatccggcaaggctgcaggccgtgtttgccaacgcctgatttgcctgtgtactgatttgcctgtgtaatcagcggcttgcgcacttgccgccatgcgcgctataatgtaaggctattcaaccttgccacaccggactcgtgacgcccgggtggctaatccaaaaggagcgtcaatgcgtcattacgaaatcgtcttcatcgtccacccggaccagagcgaacaagtgccggccatgatcgagcgctacaagcagctcgtgacctcgcagaacggcaacgttcaccgcgtggaagactggggccgtcgccagatggcttacatgatccagaagctggccaaggctcactacgtttgcctgaacatcgaatgcggcaaggaaacgctggctgaactggaacacgcgttcaagttcaacgacgccgtcctgcgccacctgatcgtgcagaccaagaaggccgagaccgcaccttcgccgatgatgaaggaagtgcagcgcgaagaagcccgcaaggccgcgcaaacgaccaccgaaggccaggccgcctgagtgcggactgcggtgcgcgccatggctgacagcgtcggctacggcagcatggattgcaaccagcaagaggtcccgcgttgaaccagcttcggcttgccgccaccctggcggaacgcgatgccctgcgctataccccggccggggttcccgtcgtgaactgcatcctgcagtacagcggcgaggccgtcgaggcgcaaacgccgcggcaggtcgagtttgcaatctcagcgatgggggtcggacaggttggccagcgtctggagcgcttaccgctcggcacgctgctcgactgcgaaggattcctggcccgcaagcaccgcaacagcaaggctctcgtctttcacatcactggatgtaaagcattcgaaaaggattgaatcatggcattcgtcaaacgtgacaacaagaacaagaagcgcttccagcaacagaacccgctgttcaagcgcaagcgcttctgccgcttcaccgtggctggcgtggaacagatcgactacaaggatctggacaccctgaaggacttcatcggcgacaacggcaagatcacgcccgcccgcctgaccggtaccaaggctcactatcagcgtcagctggatacggccatcaagcgtgcgcgtttcctcgcgctgatgccgtacaccgacctgcacaagaactgatcaggccataggtccgttaaggagagaatacgatgcaaattattctgctggaaaaagtcatcaacctgggcaacctgggtgacatcgtcaaggtgaaggacggttacgcccgtaacttcctgatcccgggcaagaaggcccgccgtgctacgcaaaccgcgatcgccgaattcgaagtcaagcgcgccgagctggaaaaggccgctgccgagaagctggccgccgcgcaagccgaaggcgagaagctgagcggcctgagcgtccagatcagccagaagtcgggtgtggacggccgcctgttcggttccgtgaccaatgccgacatcgctgaagccctggctggccaaggcttcaagctggaaaaggcccaggttcgcatgccgaacggtccgctgaagatggtgggcgaccacccggtcagcgttgcgctgcacacggacgtcgtggtcgacgtgaccgtgtcggtcgtgggtgagagcgtctaaggacgtgccgccttgccggcgcgctgcgccggctgaagcaccgcaagcaagaaaggcaggagccccggctcctgcctttttttgttgcccgcttgtctttgcctgcccggtcgccaaatgtccggcgaagtgcgtcctcccgccgttataatgcctccccatgaacgcgcccgtcgccgacccccaactcgagaacctcaaagtcccgccgcattccatcgaagccgagcaatcggtgctgggtggcctgctgctggacaacgccgcctgggaccgcattgcggacttcatttccgaggcggatttctatcgttttgaccaccggatgatcttccagagcatcgcccggttgatctcggccaccaagccggccgacgtgatcacggtctatgaaatgctgcaggtcgccggcaaggccgaggaggtgggcgggctggcctacctgaattcgctggcgcagaacacgcccagcgcggccaatatccgccgctacgcggagatcgtgcgtgagcgctcggtgctgcgcaagctggtgacggcggccgacgatatcgcctcggccgcgttcgcgcccaagggccgcgaggtgcgcgagctgctggatgaggccgagtccaaggtttttgcgattgccgaagaaggctcgcgcggccagaagggtttccaggaaatccagccgctgctgacccaggtggtcgagcgcatcgacgagctgtaccaccgcgattccaccaccgacgtcaccggcgtgccgaccggcttcatcgacctggacaagatgaccagcggcatgcagccgggcgacctgatcatcgtggccggccgcccgtcgatgggcaagaccgcgttctcgctgaacatcggcgagcatgtggcagtggagcagggcctgccggtggcagtgttctcgatggaaatggcgggcacccagctggccatgcgtatgctcggctcggtaggccgcctcgaccagcaccggctgcgcactggccgcctgctggatgaagactggccgcggctgacgcatgcgatccagcgcatgaacgacacccagctgttcatcgacgaaactccggcgctgaacccgatggagctgcgtgcccgttcgcggcgcctggcgcgccagtgcgggcagcttggcctgatcatcatcgattacctccagctgatgtcaggttcgggcggcggcgagaaccgcgccacggaaatttcagaaatctcccgttcgctcaagggtctggccaaggaactcaactgtccggtgattgcactgtcgcagctgaaccgaagcctggaacagcgtcccaacaagcgtccggtgatgtccgacctgcgcgaatccggcgctatcgaacaggatgccgacgtgatcctgttcatctaccgcgacgaagtctataacgcagactcccaggacaagggcacggccgagatcattatcggcaagcagcgtaacggcccgatcggcacggtgcgcctgaccttcctgggccagttcaccaagttcgacaacttcagcggcggcccggctttcttcgacaacgatacctgacgaagtcaagccagcctgcaatcgtccgtgcggcgccgtcttgtttgcgccaaattcgcgggcaatgtcccagtaaccctgtaaaatattgcgctttgatgacagtcgccacccgcgactgtcatgcaacgcgtccgctcaatcctgcaacacaatcagcagcgtcaccacgctgccacaaggaacattccatgttcggccgattcatgcccacggagggcaagttcttcgaatatttcaaccagcatgccgactgcgcggtgaccgccgcccatgagctccaggcactggtcaacgacttgcccaacgccgaggcccatgcccgccgcgtccaggccactgaaaagaaggccgaccggatcacgcacgacaccatcgacctgctccacaagaccttcatcacgccgctggatcgcgacgagatccacaagctcatcacgaccatggacgacatcctggatctgatggaagacgtggccgagactatctcgctgtacgacgtgaccaacctgaccgacgaagcgctgcgcctggcggccatctgcgtgcagtgctgcgaccaggtcaagatcgcggtgggcctgctcgaggacatgggcaatgccagcaccatcctgaagaccgcccagcagatcgaccagcttgaatctgaagccgaccgcgtgatgcgctcggcgatgtccaagctgttccgcgacgagaccgacgtcaagcgcctgatcaagctgaaggccatctacgaacagctcgagacgatcaccgacaagtgcgaggacgtcgccaacatcatcgaaggcatcgtcctggaaaacgcctgaggcggcaatcggcatgcagaccatacaaatgagcctgtgggtgatcgccttgctggtggcgctcgcgctgctgttcgacttcatgaacggcttccacgacgcggccaactcgatcgccacggtggtgtccaccggcgtgctcaagccgcaccatgcggtggcaatggcggcgatgtgcaacgtcgtcgcaatctttgtctttcacctgaaggtggcggccacggtggggaccggcaccatcgacgtcaatatcgtcgaccactacgtgatattcggggccctggtcggggcgatcgcctggaacgtcatcacctggtattacggcatcccgtcgtcgtcgtcgcatgcgctgatcggcgggctggtgggtgcggcggtggccaaggccggcacgggcgcgctggtgggcagcggcctgctgaagaccgtggcgttcatcctggtctcgccgttgctgggcttcctgctcggttcgctgatgatggtgatggtgggctggaccttcttccgcacgccgccgtcgcgggtggaccgctggttccgccggctgcagctggtttcggcctcgctgtacagcctgggccacggcggcaatgacgcgcagaagaccatcggcatcatctggatgctgctgattgccagcggccatgtggtcgccggcggccagccaccgacctgggtgatcgtcagctgctacgtggccatcggcatgggcacgctgttcggcggctggcggatcgtgcgcaccatgggccagaagatcaccaagctcaagccggtcggcggcttctgcgccgagacgggcggggcgattacgctgttctttgcctcggcgctgggcgtgccggtatcgaccacgcataccatcaccggcgccatcgtcggcgtcggctcggcgcagaagatgtcggcggtgcgctggggcgtggccggcaatatcgtctgggcctgggtgctgacgatcccggcgtcggccttcatggcggcgatcgcatggtggatcgggcggcatatcctgtaaggcaggggccgccgtaccaacaagaagccaggctgatgcctggctttttgtttgggcgcttcactggttggcgaaggccgcgatgggatcgtcgtctaccccaagcggtgccgaggccggcgccggctcaggcagcggtggcgcggccggggctgccactggcgcgggcggctggttgaccgccgcgaccacgcggcgcgcgccgttgtagcgcgaggcccagtaaggcttgcccatgtcttcgagacggaccgtgccgccggacgacggtgcatggacaaagcggttctgtccgacgtagatgcccacgtgcgaattggcgcggccggtggtgttgaagaacaccaggtcgccggatgccacttcgctgcggtccagcgagctgccgcggacgcccatcgcctcggtggtgcgcggcaggttcacattggccgcgcgcgacaccacgtagcgcaccagcccgctgcagtcgaagccggagtccggtgtattgccgccgtagcgatagggtgtgccgaccagggacatcgcctggatcgaaatctcttccagtccggcgctggggtcgatcatgggtttgcccggcgtccgcggcaggccggcgtggcgcgaagacggggaactggcgcaggccgccagcagcagggcggtggcgcagagcagcggcagccggacctgggcaagcaggccctgcgcacgcagtggatgggtagggattcgggtacggcgcaatggcatcctgggtttccggtcgccggcctgccggcgcaccggaagccttgccgctaccagcgtagctgggcgttgcgcgtaccggtgctgaccttgatggacttggcctggcccttgtaactggcctcgatattgtagctgccttcgggcgcacgtatcaggcagcgcgggccggcggcgcggaagctggcgacttcctgcccgtcgcgcatcagccggaccgccacgtccgacaggaattcaccgttcgcaccctgggtgaacaggatgcccatgttgaagtccttttccttcgcggccagcgcctggcgctcgtcctcggcgacaccgccgcagacgtagctgaccgggcccatggtgcggatcaccatttcttcggcggcggcatgggccgggcgccagctggcggccagcgccatgccggcggctgccagcatggccagtgcaaggcgctgcctgtgctggctgtgggcgacggcaggcgcatgcccgccgggcagatgctgggtattcatcgacgcctccagtggggatgcggggcaacggcaaacatggggccatcatagccccaaagtgcttgccgttgacgacggtgctcaggcgctgcgggcgcgccccgccaccggcagggcgcgcccgcaggttgccggtgtcagagcacgtcgccggcgtggtcggccaggcgcgagcgttcgccgcgcgccagcgtgatatggccgctgtggctccagcccttgaagcggtcgaccacgtaggtcaggcccgacgaaccctcggtcaggtacggcgtgtcgatctgcgcgatattgcccaggcagatgatcttggtacccgggcccgcgcgcgtcaccagcgtcttcatctgcttgggcgtcaggttctgtgcctcgtcgatgatgacgaacttgttgacgaaggtgcgcccgcgcatgaagttcatgctcttgaccttgatgcgcgaccggatcagctcctgcgtggcggcgcgtccccagtcgccggcgctgtcgtcgctcttctgcagcacctcgaggttgtcgtcgaacgcgcccatccagggctgcatcttctcttcctcggtgccgggcaggaagccgatgtcttcgcccaccggcaccgtcgcgcgcgtgacgatgatctcgttgtactgcttctggtccagcacctgttccagcccggctgccagcgccagcagggtcttgccggtgccggcctggccgagcagcgtgacgaagtcgatgtccgggttcatcagcaggttgagcgcgaagttctgctcgcggttgcgggcggtcacgctccacacattgttcttgtggtgcgtgtagtccttgagggtctgcagcagcgcggtcttgccgttgatctccttgacctgcgcgtacagcggcaggctgccgtcgaccggttccaggtagacgaactggttgaccaggaacgacggcaccagcggcccggtgagccggtagaacatggcgcctgacttcgggtcctgccagctttccacgcccttgccgtgcctggtccagaagtcgccgggcagctgcagcacgccggcatagagcaggtccttgtcttccaggacctggtcgttgaagtagtcttcggccggcaggcccagtgcgcgcgccttgatgcgcatgttgatgtctttcgacaccagcacgacctggcgctcggggtactgctgctgcagcgcgctgaccacgcccaggatctggttgtcggccttgccctgcggcaggccttcaggcagcttgatgtcgttcaggcgcgtctggaagaacagcttgccctgcgcgtcgcggttgcccagcttggccagcggcaggccttcgtcgagcacgccgtcggtgccgcccaccagcgaatcgagcgtgcggctgaccatgcgcgcgttgcgcgcgacttcgctcatgcccttcttgtggttgtccagctcttcgagcgtcatcatcggcagatagatgtcgtgttcctcgaagcggaacagcgaggccgggtcgtgcatcagcacgttggtgtcgagcacgaacagcttgctcgggccttcggacttgcgggcgcggcgcgtggggccggtggacggcttgaccaggctgaccggtgcggcattgacggcaggcgtcgatacggccggggtctcggtgctgcgggcacgggtgccaccggcggcgcgggcctggacctcaggcacctcggtgtcgccggtttccagcaatgccacgcgctcgagcgccggcacaggtttcttgccctgtgtggcggctttggccttgggcaccgcggagaccggagcaaactcgctcggatccagcaattgggcaggcttggcgggcatggtaggcagcggcatgcttggctttcctttcagggggacaagaagggggcgagggtatccgtgccgcgacgccgcgatacgtcggagacggcgtggcgaccgatggccggggcatgcatgcgcgaggctcccggcgcggacaggcatgaggacagacgcggttgcaaacaaaaaagccgccatgcctgcataacaggattggcggctcttttgcggactgccgacacggcaggtccgctaccggcctgtggcgcgaaccgcctgggccggggagtcgaaacagcgtggcatccggaatctgaactcattacgggccaatgtatccgaaggttttgggtttggcaattgggtttgccaacggcgtgttgcgacacagcacggccgggctggcgtccgtgtcgtggcaaggccgataccgacgcgatacctcagagcccgcgcacgatttccaggacttcgtcaacatggttcggcaccttgatgccgcgcagctcgtggcgcaggatgcccttgccgtcgatgatgaaggtgctgcgctcgatgccccggtgctccttgccatagagctttttcagcttgatgacatcgaacagcgtgcacacggcttcgtcggcgtcggagatcagctcgaagggcagctcaagcttggccttgaagttctcgtgcgagcggatgctgtcgcgcgagatgccgaacacctgcacgccggccttttggaagtcctcatactggtcgcggaagttcatggcctccgtggtgcaacccggcgtgttgtccttcgggtagaagtacagcaccaccgtcttgccgcggtagtcggcaaggcggaaggtggcgtcgccggtcatcggcgcgctgaagtcgggtacggccttgttcagactgacggtcatgcttgtggctcctgggggaggggcagggggatcgggagaatcgggtgagggggctgccaccttggcggggcagattggggcgccctgccggacttcaagcgtggcgccggctcaacttttgcaaagatcaggcggcttccgcttcgagcagcagcaccgccgccaccttgcggccttccgccatcaggatgttgtaggtgcggcaggcggcctgcaggtccatggcgtccaccccgacatggcggcgcgacagcgacgcggtcaggcgcgggtgcgggaagcgcagccgcgagccggtgccgagcagcaccacttcggggccgagttccaccagctgctcgaaatgcgcaggctccaggtcttcgaagcggctgaccggccagggccggacctcgccctcgggcatgaccaggaccgagttggtgtgacggacgaggttgatctcgatgtagcccggcccgtaggccgtgacggtattgagcgattggggctggtcggcgtggagtttcacttggaggcctctgcggcggccgccacgggctggcgggccggcccgtggggcggatggccggcaccccgggcgggtacggtgtgggcgacaggatggacgacagtgcgcaggcacctggcgtgtgcgcggcaagcgcacgctgcaatgcaagaatccctgccgaagtctgtcataatccgataaattatagcttttgcctccctgtctgccacgttcgcgttgcattgcagcggacgtcgccccggcgcggggcttccgcacggggcttcggcattaattcagattcgcccagattccctgtccggtgccgccgacgcggcacgctacgcttgcccgacatcgccgtgaaacccatccagaaatccaacaaactcaataacgtttgctacgacatccgcggaccggtgctggaaaaggccaagcagatggaggaagaagggcacaagatcatcaagctgaatatcggcaacctggccgtgttcggctttgacgcgccggaagagattcagcaggacatgatgcgaaacctgccgaattcggcaggttattctgattccaagggcattttcgccgcacgcaaggcgatcatgcactatacccagcaaaaaaatatcgaaggcgttggcctggacgatatatatgtgggcaacggtgcctccgaactgatcgtgatggccgtcaacgcgctgctcaatgccggcgacgaagtgctggtgccggcgccggactacccgctgtggaccgccgcggtgagcctctcgggcggcacgccggtgcactatatctgcgacgagtccaacgactggatgcccgatccggccgatatccgcgcccgtatcacgccgcataccaaggccatcgtcatcatcaacccgaacaaccccaccggggcgctgtattcggacgagctgctgctcgagatcgtcgccatcgcgcgcgagcacggcctgatcatctatgccgacgagatctacgacaaggtcctgtacgacggccacacccacacctcgatcgcctcgctctcgaccgacgtgctgaccgtgaccttcaacggcctgtcgaagaactaccgctcatgcggctaccgcgccggctggatggtggtgtcgggcgacaagcgcccggccatcgactatatcgaaggcctgaacatgctgtcgtcgatgcgcctgtgcgccaacgttccgggccagtgggcgatccagaccgcgctgggcggctaccagagcatcaacgacctggtcaatgaaggcggacgcctgcgccgccagcgcgacctggcctacgagctgatcaccgcgatcccgggtgttacctgcgtcaagcccaaggcggcgctgtacctgttccccaagctcgacctgtcgatgtacccggtgcaggacgaccaggagttcatctacgaactgctgcaggagtccaaggtgctgctggtgcagggctcgggcttcaactgggccaagcccgatcatttccgcatcgtgttcctgccgcacgaggaagacctgcgcgaggccatcggccgcatcgcgcgcttcctcgaggcgtaccgaaaacgccacggcaaggcagcggcctgatttcgcgggccgcgccgcaattcatccttagcaactcagaagattgtccatgaaccccatcaaagttggcctgctcggcatcggtaccgtcggtagcggcacgttcaacgtgctcaagcgcaatcaggaagaaattcgtcgccgcgccggccgcggcatcgagattgccgtggtggccgatctcaacaccgaacgcgcgcgcgaactgaccaacggggaagtggagatcgtcagcgacgccaacgaggtggtcagccgcccggacatcgatatcgtcatcgaactgatcggcggctacggcatcgcgcgtgagctggtgctcaaggcgatcgagaacggcaagcacgtggtcaccgccaacaaggcgctgctggccgtgcacggcaacgagatcttcgaagccgcgcgcaagaagggcgtgatcgtcgccttcgaagccgcggtggccggcggcatccccatcatcaaggcgctgcgcgagggcctgaccgccaaccgcatccagtggatcgccggcatcatcaacggcaccaccaacttcatcctgtccgagatgcgcgacaagggcctcgatttcgacgtggtgctgaaggaagcccagcagctcggctacgccgaagccgacccgaccttcgacatcgaaggcgtcgatgccgcgcacaaggtcacgctgatgagcgcgatcgccttcggcatgccggtgcagttcgacaaggcccacgtggaaggcatcaccaagctgtcagccatcgacatcaagtacgccgaggaactgggctaccgcatcaagctgctgggcatcacccgccgccgcgacgacggtgtcgagctgcgcgtgcatccgacgctggtgccggcctcgcgcctgatcgccaacgtcgaaggcgcgatgaacgcggtgctggtgcagggcgacgccgtgggcgcgacgctctactacggcaagggtgccggcgccgagccgaccgcctcggccgtgatcgctgacctggtcgacgtgacccgcctgcacaccgccgatcccaaccaccgcgtgccgcacctggcgttccagccggacgagctgtcgagcgtgccggtgctgccgatcgaagagatcaacagctcgtactacctgcgcatgcgcgtggccgacgagaccggcgtgctggccgagatcacccgcatcctggccgagggcggcatctcgatcgacgccatgctgcagaaggaatcgcgcgagggcgagccgcagaccgacatcatcatcctcacgcacatcacgcgcgagaagcacgtcaacgcggcgatcgccaagatcgaggcgctgcccaccgtgctgtccgccgtgacgcgcctgcgcatggaagaactgaactaagggccggacctgctgattcacatgaaataccagtcgacccgcggccatgagatgccgcaatcgttttccgagatcctgctgggcggcctggcgccggacggcgggctgtacctgcctacgcagtacccgcaagtcaccgccgacgaactggaggcctggcgcaagctgtcgtatgccgacctggcctacgagatcctgcgcaagttctgcgacgatattcctgccgaggacctgcgcgcgctgacgcgcaagacctatacgcccgaggtgtactgcaacgcgcgcgagggcgacaacaccgccgacatcacgccgctgcgcacgctcggcgaggaaggtggcaccaggctgcaactgctgggcctgtccaacggcccgacgctggccttcaaggacatggcgatgcagctgctcggcaacctgttcgagtacgcgctgggccgcgccgggcaggagctgaacatcctgggcgcgacttccggcgataccggcagcgcggcagaatacgccatgcgcggcaagcgcggcatccgcgtgttcatgctgagcccgcaccgcaagatgagcgcgttccagaccgcgcagatgttcagcctgcaggacgccaacatcttcaaccttgccgtcgaaggcgtgttcgacgattgccaggacatcgtcaaggcggtctccaacgacctcgactacaaggcgcgccagaagatcggcacggtcaactcgatcaactgggcacgcgtggtggcccaggtggtgtactacttcaagggctggctgctggccaccagcggccccggccagaaggtgtcgttctgcgtgccgtcgggcaacttcggcaacgtctgcgccggccatatcgcgcgcatgatgggcctgccgatcgacaagctggtagtggccaccaacgagaacgacgtgctcgacgagttcttccgcaccggtgcctaccgcgtgcgcaagtcggccgagacgtaccacacctcgagcccgagcatggatatttccaaggcctcgaacttcgagcgcttcgtgttcgacctgctcggccaggacgccggcaagctggtggtgctgttccgcgacgtggaagagaagggcggcttcgacctgtcgggcacgccggaattcgaccgcatccgcgagttcggctttgtctcgggccgcagcacgcacgacgaccgcgtagcgaccatccgcgacctgtcttcgcgctacggcatcaccatcgatacccacaccgccgatggcgtcaaggtggcgcgcgagcatctcagcgccggcgtgccgatggtggtgctggaaaccgcgctgccggccaagtttgccgacactatccgcgaagcgctcggccacgagccggagcgccccgcaaagttcgagggcatcgagagcctgccgcagcgctttgaagtgatgccggccgacgccgcacaggtcaaggcctatatcgccggccacaccggcctgtaagcgcgcgggcgcgtgcagcccgctgcggcgctgccgcatgccgggcccgcgccaactcgctacaatcaggctgcgggcccgatcttcggcccccggattgcctgccccaaccaagtggtgccggcaatgcgcgggccgtttttcgtgggccaacactttcccacatcgcaccatgacccaagccgcagcaccttcccgccccccgatgctgaccatggcccaggcgctcgacgcgctgctcggcgccgcccgtccgctggcgcagcttgaatccatcgacacgctccacgccaacggccgcgtgctggccgcgcccgtgaccagcacgctgcgcgtgccgccggcagacaatacctcgatggacggctacgccatgcgcgcgggcgatgtgcccgctgccggcacgcggctgcgcgtgtcgcaacggattcccgccggccatgtcggcaccgcgctggaacccggcaccgccgcgcgcatcttcaccggcgggctgatcccgccgggcgccgacgccgtggtgatgcaggagcaatgcaccgccgagggcgaggacgtgatcgtcaaccacgtgccgcaatccggtgaatgggtgcggcgcgcgggcgaggatatcgaggccggcagcgtgatcctgccggccggcacgcggctgacgccgcaggcgctggggctggccgcatcggtcggccaggcgaagctggacgtggtgcggcgcgtgcgcgtcgccgtgttcttcaccggcgatgaactggcgatgccgggcgagccgctcaagccaggcgccatctacaactccaaccgcttcacgctgcgcggcctgctggaaaacctgggctgcgaggtcagcgacttcggcatcgttcccgacacgctggccgctacgcgcgagacgctgcgccgcgcggcgcagggacacgacctgatcatcacctcgggcggcgtttcggtcggcgaggaagaccatatcaagcccgcggtcgaggccgaggggcggctcgacatgtggcagatcgcgatcaagccgggcaagccgctggcgttcgggcaggtcaacaacgatgccgggccggcgttcttcctgggtttgccgggcaacccggtgtccagcttcgtgaccttcctgctgttcgtgcgcccgttcatcctgcgcctgcagggcgtggccggcgtgacgccgcggcgcctgccgctgcgcgcggacttcgaactgaacaagggcgaccgccgcaatgagttcctgcgcgcgcgcatcaatgccgagggcggcctggacctgttccccaaccagagctcgggcgtgctgacctccaccgtctggggcgacggcctgatcgacaatccgcccaaccagccgatcgcgcgcggcgataccgtgcagttcattccgtttgacggcctgctcgcatagccggccagcgttaccaggacacagaagctgtgatgaccatcgaactccgattctttgccagcgtgcgcgagcagctgggcgtggctgaagagcgcgccgaggtgccggccgacgtgcgcaccgtgggcgaactgcgccactggctgattcagcgcggcggcccctgggccgaagctctggccgaaggccgcgcgctgcgcatggccgtcgaccatgcggtggcgcgccccgatacggcgattgccgacggctgcgaagtcgcctttttcccaccagtgaccggaggctgagatgagcgtcagggtgcagcgtgaggatttcgatctcggcgcggaagtcgctgcgctgcgtgccggcaatccggcggtcggcgcggtggccagctttatcggcacggtgcgcgatgtcagcgacggcagcgcggtcagcgcgatggagcttgagcactatccgggtatgaccgagaaggcgctggcgcagatcgaagcggctgcgtgcgcgcgctgggcgctgctgggcgtgaccatcatccaccgcgtcgggccgatgcagccgctggaccagatcgtgatggtcgcggtggcgtcggcgcatcgcggcaatgcctttgccgcgtgcgagttcatcatggactacctcaagtccgaagcgccgttctggaagaaggaagacaccccggaaggggcgcgctgggtcgacgcccgcgtgaccgacgaagccgccctccagcgctgggggatcgcatcgttcaatgccagcggcgacgatgctggcgcaccaccggagaagcagggcgggagccagccctgatggggccgctcggctttgtcgccgtgggcgtaggcgccgcggcgggtgcgtggctgcgctggggctttgcggtgctgtggaacgcgatcaatcccgcgctgccctatggcacgctggcggccaacctgctgggcggctacctggtcggcctggcggtcgggttcttcgatacgcacgcgggcctgccgccggaatggcgcctgctggccatcaccggcttccttggcgggctgaccacgttctcgaccttctccagcgaggtggtggcgaacctgattgccggcgactatggctgggcggggctgcacctgctgctgcacctgggcggctcactgctgctgaccgcgttcggcctctggacttaccgcctgctggcctgacgcggcccgggcgatcaggcccagcagcgcggcattgaatgcctgcggctgctccatgtgcgggctgtggccggcgccggccaccacgctgaatcccgctccgggccgcagtgcgagcgtagcggtgcccaccgcgggcgcatagagccggctggcttccccgtacaagtggaacagcggcagcccggcaccgcgcaatgtctcccggaaatcctggcgcgccatgtcttcccataaagcggcaagcgcccacgcatcgcactggcccgccatgtgcgcgatgcgctgcattgcggcgtcttccgggcgccttcccgccgaccacattcccagcgcgactgacggcgccagccgggtccagtcggcccggatacgggccgccatctgcgcggcgtgcgcaatctcatagtggccgtgcaggccatgcggccaggccgcatcggtcaccagcctcggtgtcatgtcgatgctgccgaccgctgccagcggaagacccggatggtcgcgcagcagcgcccatgccaccatcgcccccatcgaccagccagccaccaccacgtctgtcagcccgaggtgtgcaaccagtccggcgacgtcgcgtgccagcgccgtgatcgtggtgccgtcgcgctcgcgcgacaggccgtggccggcatggtcgggcgcgatcacgcggaatcccgccagtgcgagcgcccgctggccgtcgaaggcctcgccggtgacggaccagccgtgcagcaacagcagcggccgtccctggccggtttcgcgccagcctggcaaggcgccgcgtgccgggtggctggcgaacggcggcgaagcggggccggcaggtgccgaatcgggagcgtccaacgacggttctctcctggcaggagggtaaagggcagcggcctggatgccaccgggtgagggtgcctctctattgacatccacggtgggcaatttatacgatgaaacatgaatcagctatcaggttttgcctgagtggcgattcccggcgcaggcaggcgcggaggaggcacctgcctgcgccggcatgacatgaagcggctggcattccaatgacaaggcgcgcagcgccaccggagacaagatgtcccagaccgacacgggcgcaccgcccgaaaccggcgcaacccgcgaacccggccatgccggcggcatctgcccgcccaagaccgcgcgcgggcagaagacgcgcgaggcgctgctgcgcgcggccgagaaggtgttcggtgagaaaggctattacgccgcgtcgatctccgagatcacgcaggaagccaaggttgcgatgggcactttctacctgtatttcaaggacaaggaggacatcttccgcgcgctggtcgcgcacatgctggaactggtgcgcgcccacctgcgcaagcacgttgccgccgcggccacccagatggaagccgagcgcctgggcctgaaggcatttctctctttcgtttcgcgccacaagaacctgtaccggatcgtgctggattcgtactcggtggacgagaccatctacagcagctatttccaggtgtttgccgagctctacagccggcgcctgacgcgcgccgaggagcagggcgagatcgtgcccggcgatgccgaggtgcgcgcctggtgcctgatcggcatcagcaacttcctgggcatgcgctatgcgcgctggaagcgcccgccttcgatggagaaggtggtcgacaccgccttcgacctgatctcgcacggcctgcagccgcgatgaacgctgacgcagaacccctggtgcagtgggagcgcgccgtcgatggcgtggcgctgctgcgcctgaaccggccgcagcggcacaacagcctggtgcccgagttgctggaagcgctgctcgccgcgctggacgagattgaagccgacccggcgatccatgccgtggtgctgacgcatgccgggaaaaatttctccaccggcggcgatgtcgcggcattcgctgcgcagggcgacgcgatagccagctacgccgaccggctgctggcactgctgaaccgttcgatcctgcgcctggcagcgctgcgctgcccggtggtggcggccgtggagggctggctgacgggcggctcgctgggtttggtgctggcgtgcgacatggcggtgctggcgcgggatgcgcgcatcgcgccgtactacacggtggttggcttcagcccggacggcggctggaccgcgatgctgccgcagctggtcggcacgccgcgggcgcgcgcgtggcagctgaacaatgcgatcgtcgccgcgccggaggcagaggcacttggcctggccaccgcgctggccgcaccgggttcggccgaggccgatgccgcgacgctggcgcgcggcgtcatgcgcaaggtgccgggcagcgtggcccgcacgcgcgcgctgttgcgctgggacgccgacaccctggcggccggccttgagcgggagcgcgcggcctttgtcgcacagatcgccagtgccgagaccgccgacggcatgcggcgcttcctggcagggcgcgcgcgcgaatagtctgtagagctttcccaggcagttgcagcaggtttcatccagacaaacacaaacgagaccgaacacaggagacagcaatgcaacgcaacccactcgccgtacgtgccctggtcatggccgccggcctgcttgccgccggcaccgcgctggccaaggacatccgcatcgcgcacgtctatgacaagaccggcgcgctcgaagcctacgccaagcagacccagaccggcctgatgatgggcctggagtacgccaccaacggcaccatgaccgtcaacggcaacaagctggtggtgatcgagaaagacacccagggcaagccggacgtggccaaggcccagctggccgccgcctacagcgacgaccgcgccgatatcgcggtcggccccacctcttccggcaccgcgctggcgatgctgccggtggcagaggaatacaagaaggtgctgctggtcgaacccgcggtggccgactcgatcaccggcgacaagtggaaccgctatatcttccgcaccggccgcaattcgtcgcaggacgcaatctccaacgccgtggcgctggacaagccgggcgtgcagatcgccacgctggcgcaggactacgcttttggccgcgacggcgtcaaggccttcaagggcgcgctgaagaacgccaggatcgtgcacgaggaatatctgccgaccagtaccacggacttcaccgcaggcgcgcagcggctgtttgattcgctcaaggacaagccaggccgcaaggtgatcttcattatctgggccggtgccggcaacccgttcaagatcgcggatctggatcccaggcgctacggcatcgagattgccaccggcggcaacatcctgccggcgatggccagctacaagaacttcccgggcatggaaggggccacgtactactacttcggcatccccaagaacaaggccaatgagtggctggtgtccaaccactacagcaagttcaaggcgccgcccgacttcttcacggccggcggcatgaccgcgggcatcgcgctggtcgaggcgctgaagaagaccagcggcgagaccggcaccgagaagctgatcacggcgatggaaggcatgtcattcgacacccccaagggcaagatgaccttccgcaaggaagaccaccaggccatgcagtcgatgtaccacttcaagatcaaggtggatccggccttcgcctggggcgtgcctgagctcgtgcgcgagatcaagcccgaagagatggccgtgcccgtgcgcaaccaccgctgatgaacgcgccagcctccttcgcccggtccgtgccggcgccgtcgcagccggccgccgggcacgccggcgcgactgccgtcggggcgcagccgctgctggagacgcgcggcctgaccatccgctttggcggccacgtggccgtcaatgcggtgtcgtgcgcgttccggcccggcgagctgacctgcatcgtcggcccaaacggcgccggcaagaccacgtatttcaacctggtctcgggccagttgccgcccacggccgggcagatcctgctggatggcgaggacgtgacgcgcctgccggtgtcgcagaagacgcgccgcggcatcggccgcgccttccagctgaccagcctgttcccgcagctgtcggtgctggagaacgtgcgcctggcggtgcaggcgcgccggcagcgcggcctcgacctgttctcgatgtggaccagccaccgcgacgtgcaggcgcaggccatggcgatcctggagcgcgtggcgctggccggcaagcgccagctgacggtggcctcgctgccgcacggcgaccagcgcaagctggaggtcggcatcctgctggcgctgcagccgcgcgtgttcatgttcgacgagcccaccgcgggcatgagcgttgatgaagtgccggtgatccttgacctgatccgcgagatccgccaggaccgcagcaagaccgtgctgctggtcgaacacaagatggacgtggtgcgctcgctggccgaccgcatcatcgtgctgcacaacggcatcctggtggccgacggcgacccggccgaggtgatcgcctcgccggtggtgcagcaggcttacctgggcatgccggaagaggagggcagccatggctgacgcacaagcaaccgggccgatcctgcggctgcagggcgtgcagacccatatcggcccgtaccacatcctgcacggcgtgagcttcgaggtgccgcgtggcggcgtgaccatgctgctggggcgcaacggtgccggcaagaccaccacgctgcgcaccatcatgggcctgtggcaggccagcgcgggcacggtgacctttgacggcaccgacatcacgcgccacagcacgcccgcgatcgcgcaggccggcattgcctacgtgccggagaacatgagcgtgttctccgacctgaccgtggccgagaacatgcgcctggcagcgcgcaccggcgccatcgacgagcgccggctggactgggtgttccgcatgttcccggcgcttaagaccttctggcagcagcgcgccggcgtgctgtcgggcgggcagaagcagatgctgtcggtggcgcgcgccatcatcgagccgcgccagctgctgatcgtcgacgagcccaccaagggcctggcgccggccatcatccagaacatgatccatgtgttccgcgagctcaagcagaccgaggtgtcgatcctgctggtggagcagaacttccatatggcgaagtcggtgggggatacggtggcggtgatggacgatgggcggacggtgcacacgggaacgatggcggcgctggctgaagacgagtctctgcagcagaagctgctggggctgtcgctggctgcgcaccagtaaggcgggacaatacacatgaccacttcaacgactttgccggccgccgcaccgtcggacctgcccaaggtgcgcctcgactggaccccgctggcgctggcgccgctgctgatgctgctggcctatccgctggtcggcagcccgtcgacctggctcacgctgaccattgccggcctggcgatgggcatgatcatcttcgtcgtctcctccggcctgacgctggtgttcggcctgatggacgtgctcaacttcggccacggcgcctttatcgcgctgggcgcctacgtggcggcgtcggtgctgctgccgatggcgggctgggtcgaggccgacagcctggcgcagaacctggccgtgtttgcgctggcaatcgcggcggccatggtggccgcgggcgcggtcgggctgttcttcgagcgcgtggtggtgcgcccggtctacggccagcacctgaagcagatcctgatcacgatgggcggcatgatcgtggccgagcagctgatcaaggcaatctggggccccgagaccatcgcgctgcaggtgcccaccactttccgcggcgcggtgctgctcggcgatgccgccatcgagaaataccggctgatcgcgatggcgctggggctggtgatctttatcgccatgctgttgctgctgaatcgcacccgcatcggcctgctgatccgcgccggcgtggagaaccgcgagatggtcgaagcgcttggctaccgcgtgcggcgcctgtttatcggcgtgttcgtcgcgggtgcggcgctggcggggctgggcggggtgctgtgggggctgtaccagcagaacatcaccgcggcgatcggtgcgcaggtgaatgtgctgatctttatcgtcatcatcatcggcgggctgggatcgaccacgggctgctttgtcggtgcgctgctggtggggctgatggccaactacaccggtttcctgttcccaaaggtggctctgttctccaacatcctgctgatgatgctggtgctgctgtggcgcccgcaggggctgtttccggtggcgcggcgctgagggtaacgaccatgatccgacttctctccggcgacctgccgcgcagccgcgtgctgaccgtgatcctgctggtgatcctggcggccctggcgtgcgcgcccttcgccttccccggcgcgcgcgcgctcaacatggcggccaagatctgcatcttcgtggtgctggtggccagctatgacctgctgctgggctataccggcatcgtttcctttgcccacaccatgttcttcggcatcggtggctatggcgtggccatcgccatgtcgcgcatggagccgggctggggcgcgctgctggccggcaccgtgggtgcgctcgcggtgtcagcgctgctggcgttcctgatcgggctgttctcgctgcgggtgcgcgcgatcttctttgccatgatcacgctggcggtggcgaccgcctttgccacgctggtgtcgcagctgtccgaatggaccggaggcgaggacgggctgaccttcaaggtgccggaggtgctgcgtcccggcttcacgctgggcgaggccgaatggctgggcgtgccgctgagcggcaagctgctcagctactacctggtgtttgccggcgcggtggtgctgttcctggtgctgctgcgcattgtcaactcgccctttggccgggtgctgcaggcgatccgcgagaacgacttccgcgccgaggcgatcggctaccgcaccgtggtgtaccgcaccgtgtcgacggtgctgtcggcgatgttcgccacgctggcgggcgtgctgatggcgatctggctgcgctacaacgggcccgatacctcgctgtcgttcgagatcatggtcgacatcctgctgatcgtggtgatcggcggcatgggcacgctctatggcgcggtgatcggcacggtgctgttcctggtggcgcaaacctacctgcaggacgtgatgaaactggccagcgaagccaccgccgcgctgccgctgctgtcgtcgctgctgcatccggaccgctggctgctgtggctgggcttgctgtttatcctgagcgtctattatttcccgcagggcgtagtggggcggctgcgcggcaccgggcccgtgcaggacgtggcaagctgagcggaggctagcgcatgtacgtcatcgactggctgcacaagaatgcgcagcatttccccgacaaggtcgcgctggtggacgtggagagcggccgccaggtgacctatcgtaaattcgacgaacgcgccagccgcttcgcggaatacctgcgcgaccacctgcaactggcgccgggcacgcgcgtggcggtgctggcgcacaacagctcggattatttcgagatgctgtatggctgtgccaaggccggcatggtgatggtgtgcctgaactggcgcctgccggcggcggagctgctgccgatcctgcaggactgcacgcccgaggtgctggtggccggcgacggcttcctcgcagtggccgcggatctcgcgcgcgccatgccgctgcgtgcggtgctgcacctggccgacgacgaggccgccgacgttcccggcggctggaccgagtacgaggcagtgctcgatgccgcttccggccgcatcatcgagatgccgtgccgcgatgagtccgaagtctggcacctgctctacacctccggcaccaccggcaagcccaagggcgtgatccagacctacggcatggttttcttcaacgccgtcaacgcgatgctggcaaacaagatcacgcgcgacgatgtgttcctcaatgtgctgccgttcttccacaccggcggcctgaacctgtatgccaacccggtgctgcacgcgggcggcacggtgcacatcatgcggcagttcgagccgcaggtggtgctgggcaagctcgaccgcgccggcggcgagggcattaccatgttcttcgcggtgccggcggtctacctgttcctgagccagcacccgcgcttcgcgcacgcggacttcgccggcgtgcgcaatatgtcagcggggggctcgccggtgcccaggccgttgctggaggcctacctggccaagggcgtgaccatctgcttcggcttcggcatgaccgagaccggccccacggtctttgtctgcgacgaagacaccgcgcgccgcaagatcggcaccatcggcaagccggtggggtcgatgctgacgcgcatcgtcgatgcggctggattggacgtgggcccgggcgagcgtggcgaactgctgatcaagggccccggcgtgacgccaggctactggaatctgcccgaggccactgcggccgcgatccgcggcggctggctgcattccggcgatatcgcctatcgtgacgaggacggcgactactacatcgtcgaccgggccaaggacatgtttatctcgggcggcgagaacgtctatccggccgaagtcgagaacgtgctgttccagctgccgggcgtggccgaggccgcagtaatcggcacgccggatgcgcgctggggcgaggtcggcatggcgttggtggtgctgcgcccgggcgccgtcctggagaccgatgccgtgatcgcccactgcaaggcgcagctggccggctacaaggtgccgcgccatgtgcgctttctcgacgcgctgccgcgcacgccgtccggcaaggtggaaaaacacaagctgcgcgcacagttttctggctgaggcgcatggccgcgccagcggttgccgtgtttccgatttccgcagttcgcagtctccgcagtcctcgatctgaagacaattcgacagccccggccatccgggtgcgacaggaggaggttgacatgcattccacgcagatcccgccgcagcagaaacagaaacgccgcctcaggctcacggtgctggcggccgccgcatcgatgctggcagccgcctgcgtctcgggcgatgacaacaacaacggcaacggcagcaaccccaataccaagccggcgaatatcggcacggtcacgatcaacagctacaacggcaccaccgacgacctgctcactgcgggcctgggcaaggacggcctggccagcgccaccgcgccactgccggccaatcccaccgcgccgaccgcggcggagctgcggcgctatgcgatccataccaactatcgtgccatcgtcgacaccaccgccagcggcggctacggctcgctctacggccccaatgtcgacgcgcagggcaatgtcaccggttccgacggcaaggtggccggcgtggagtacctggccttttcggacgatggctcgggccagcagaacgtgaccatgctggtgcagattcccgcgtcgttcaacacctcgaagccatgcatgatcaccgctacctcgtccggttcgcgcggcgtctatggcgcaatcgccaccggcgagtggggcctgaagcgcggctgcgcggtagcctataccgacaagggcaccggcgccgcgccgcatgacctggataccgacaccgtgccgctgatcgacggcacccgcgccacgcgcgcggcggccggcaagaacgcgcagtttgccgcgccggcgggggccacctcgctggcggacttcaccgctgccaacccgcaccggctggcgttcaagcacgcgcattcacagcgcaacccggagaaggactggggcaagttcacgctgcaggcggtggaatttgcgatctgggcgatcaatgaccgcttcggcgccgtgtcggccaacggcacccgccagcgcaccctggacaaggacaggatcgtggtgatcgcgtccagcgtgtccaacggcggcggtgccgcggtggcggcggccgagcaggatgccggcgggctgatcgacggcgtggcggtgggcgagcccaacctgaacatgccgcccaataccggcatcgtggtgcaacgcggcgcgacgccggtggcagcttcgggccgcacgctgtacgactacaccaccacggccaacctgctgcagcactgcgccgcgcgggccaccgcgctgacccaggcgccgttctacaccaacccggccacggcgacgttctttgccaaccgctgccagacgctggcggaaaaggggctggtgagcggcgcgaacacggacgaacagagcgccagcgcgctgcaggcgctgcatgacgccggctgggaagcggaatcggacgatctgcacccgtcgctggccgtgttcgacgtggccgccgcgatctcggtcaactatgccaacgcctatgcgcaggccagcgtcaccgaccggctgtgcggctacagctttgccagcacgctgaccgacctgaagcccgcggcaatcgcacccgcggcgctggcgtcgatgttcgccaccggcaacggcgtgccgccgcagccgccggtccagctgatcaatgacctcgatccgcagcatggcccgtacctgaacctggcgtctgtttcaccgtcgacgctgcgtgaagacctgaactacgacggcgccaactgcctgcgcagcctgctggccggctccgacgccgcggcacgcgccttgcaggccggccaggcgctgacgctgcgcaacggcaacctgcgcggcaagccggcggtgatcgtgcacgggcgcagcgacgggctgctgccggtcaaccatacctcgcgtccgtatctcggcctgaaccggcagcaggagggcgtgaccagcaagctgtcatacgtggaggtcgagaacgcccagcacttcgatgccttcatcggcctggtgccgggctacagcaaccgctatgtgccgctgcacgtctacctgaaccgggccctggatgcggtctacgacaacctcaccgcgggcaaggcgctgccgccgtcgcaggtgctgcgcaccacgccgcgcggcggcaccctcaacacgcccgcgccggcgctgctgccgtccaacgtgccgccgttcgccgcgtcgcctgcggccggcaacgcgattaccgtcaacgctaatgccgtacaggtgcctgactgatgaacgatgccctgccgcgcgtgctgtcgcagcgcgactttgaccgcttcgccgccttgtcgcacgacgacaacccgatccactgcgatccggcctttgcccgtggcacgcatttcggtgccaccgtggcgcacggcatgttcctgttttcgctgctgtgcgcccacacctggcggcagctgccagggccggcgttgccggtcgggcagacgctgatgttcccgacgccggccttcgttggcgacacagtgcagatcgcgctggcgccgcagcacactccggcgggactggcgggctacggcaccaccgttggcagcgcgggcgggccgggcgaggcgcagcgcgtcacggccgtgggcgaatcgctctggctgccggatgccgggccggagggactggcccggctgcccggcgacacggcaccggcgccagaggcgggcgacgcctcactgtacggcctgcgccccggtcaggaagccggtgcggcacgcgccttcacccaggcggacctggacgactacatcaccctgaccggcgacgccaacccctaccacgccgatccggcctttgcccgcgcgcgcgggtttggcgggccggtggtgccgctgccgctgctggccggcatgttctcggacctgctcggcacgcggctgcccggacggggcacggggtggatgaagcagtcgctgcgcctcgcttcagccgcgcggctggatgagccgctgacggcatgcgtgcgcatcatgcggctgcgcgccggcaaggacctggtcaacctggccagcgtggtcaccggcgcggacgggcgcgtggtggtgcagggcgaatcactggtgctggtgcgcaacctggcggacaagggggcctgccgcgccgcctagctgcgtatcgcttgcggcacttgcgagcgtgggagcggcggttgtcgacatagcagcggatcggggtcattgcttgccggcgcggccttgaaatgtcgcgacaaagccttatctttcggaaagacatccagtgtccggcagggcatacgggcgctccggcagcgaagaccggcgccgacgcccccgcatcaggacacgaccttatccgagagagggaatccttatgcgtcttgacaagctgaccacccggttccaggaagcactggctgatgcgcaaagcctggcactgggcaacgacaaccaatacatcgaaccgcagcacctgctgcgcgcactgctggcgcaggacgacggcgccgccaaggcgctgctggcgcgcgccggcgtcaacgtgcagggcctgcagacggcgctcgacgccgccatcaagcgcctgccgcaagtgcagggcaccagcgaggtccagatcggccgcgacctggtcaacctgctcaacgccaccgagaaggaagccatcaagcgcggcgaccagttcatcgccagcgagctgttcctgctggccgtcgccgacgacaagggcgacgccggccgcatcgcgcgtgaaaacggcctgaaccgcaagtcgctcgagtcggccatccaggccgtgcgcggcggcgattcggtcaacagcgccgaggccgagggccagcgcgaggccctcaagaagtacaccatcgacctgaccgagcgcgcccgcatcggcaagctcgatcccgtgatcggccgtgacgacgagatccgccgcgccatccagatcctgcagcgccgcaccaagaacaacccggtgctgatcggcgagccgggcgtgggcaagaccgccatcgtggaaggcctggcgcagcgcatcgtcaacggcgaagtgccggagagcctgaagaacaagcgcgtgctggtgctggacatggccggcctgctggccggcgccaagtaccgcggcgagttcgaggagcgcctgaaagcggtgctgaacgacgtcgccaaggacgagggccagaccatcgtcttcatcgacgagatccacaccatggtcggcgccggcaaggccgagggcgcgatcgacgcgggcaacatgctcaagccggcgctcgcgcgcggcgagctgcactgcatcggcgcgaccacgctggacgagtaccgcaagtacatcgagaaggacgccgcgctggagcgccgcttccagaaggtgctggtcgatgagccgagcgttgaagccaccattgccatcctgcgcgggctgcaggaaaagtatgagctgcaccacggcgtggaaatcaccgacccggccatcgtcgccgcggcggagctgtcgcatcgctatatcaccgaccgcttccttcccgacaaggcgatcgacctgatcgacgaggcggccgcgcgcatcaagatggaaatcgattccaagccggagtcgatggacaagctcgagcgccgcaccatccagctgaagatcgagcgcgaggcggtcaagaaagagaccgatgaggcgtcgatgaagcgcctggagctgatcgagcaggaaatcgcgcgcctggagaaggagtacgccgacctggacgagatctggaaagccgagaagggcgccgcgcagggcacggccgcgctcaaggaagagatcgagaaggtcaagctggagatcgccaagctgcagcgcgaaggcaagctggacaaggtggccgagctgcaatacggcaagctgccgggcctggaaggcaagctcaaggcggcgaccgatgccgaggccagcgagcagaagcagcccaacaagctgctgcgcacccaggtgggcgccgaggaaatcgccgaagtggtaagccgcgccaccggcatcccggtatcgaagatgatgcagggcgagcgcgagaagctgctcaagatggaagaccggctgcatgggcgcgtggtcggccaggacgaagccgtgcggctggtgtccgatgccatccgccgttcgcgtgccgggcttgcggacgagaaccggccctatggctcgttcctgttcctgggcccgaccggcgtcggcaagaccgagttgtgcaaggccctggccgagttcatgttcgattcggaagagcacctgatccgcatcgacatgagcgaattcatggagaagcacagcgtcagccgcctgatcggcgcgccgcccggatacgtgggctacgaggaaggcggctacctgaccgaggccgtgcgccgcaagccgtacagcgtggtgctgctggatgaagtcgagaaggcccacccggacgtcttcaacgtgctgctgcaggtgctggacgacggccgcctgaccgatggccagggccgcaccgtggacttcaagaacacggtgatcgtgatgacgtccaacctgggttcgcagatcatccagtcgatgaccggcgagccgcaggaagcgatcaagggtgcggtctggcaggaagtgcgcacgcatttccggccggagttcctgaaccggatcgatgaagtggtggtgttccacgcgctcgaccagaagcatatcgagtcgatcgcacgcatccagctgcaacgcctgcaggcccgcctggcccgcatggacatgacgctggaggtgagcgagacggcgctggagaagatcgccagcgcaggctacgacccggtgtttggcgcgcgtccgctcaagcgggcgatccagcagcagatcgagaacccggtggcccgggcgatcctggaaggcaagttcgccgccaaggatgtggtgccggtggattatgtcgacggggagttcacgttcgggcggaagctggactaaggctaccgtggctcgatcgactgccggagcacacaggcggtcgatcatggtcaggcccctgcgctgcatcgcaggggctttttttcgtcttgccatcgcgcgttgcgtgtaaggcggtcccgtcccgtgcaattttttcacgccacgatgccgcgggtcgtcgccagccgcgccgttccgcgccatccgccgagtggcacacttctcgcgttgcggaagggttgagtttccgtacaaggcgctgcgctgacgcagccccatccccaaggagcccttcaatgaccgacaagcctttcctctctgacgtcaagacattgcgcgagcgcgcccgcaagcacatcgacgatggcgccgtgaccgcgggctatgccgcggatcgcgataccgtgctgaagctgctcaacgatgcgctggccaccgaaatcgtctgcgtgctgcgctatcgccgacactactacatggccaaggggcccaactcgaagagcgtcgccgatgaattcctggcccattccaatgaagaacaaggccatgccgaccagatcgccgagcgcatcgtccagcttggcggcgagcccgacttcgcacccgacggcctgaccagccgctcccatgctgaatatgtggcgggtacttcgctgacggaaatgatcaaggaagacctggtggccgagcgcatcgccatcgacagctatcgcgagatcatccagttcctgggagaacgcgatccgacctcgcgccggatgatggagggcatcctggcggtggaagaggagcatgccgacgaaatggctgacctgctcgcccgccagggcggctgaggcgcaggcgcggcaggctggcccgcacttgaccttgatcaaccccaggtcgcaggcaagccgataacattcgtcctgtcatggagatgcgggggcgctcttcatgacttgtctacccgtttccagaacggaaacttcgcccgcaccggcttgccggtgcgggcgttttctttttggggcgtgacccatcatcctccttccgctcagcgatgccgcatgccccgtgcgccggcatgtccatatttccgtccgatcttatgcaaaaaacagcaaaggatcggcgaaaccattcgttccgttcagatagccccctcggtagtcttgctcctgacacaagtccgccacccaaggcggacaaggcaagaggcgcctcgcgcccattcacgacactgacgggagcaacacaagatgatccgcaaactggctatcagcctggccgtacttggcgccctgagcgcggcgcagaccgctgcggccgccaacctgctgaacgtttcctacgatccgacacgcgagctgtatgtcgatgtcaatgccgcctttgccaaggcctggaaggcccagggcggcgacgccgtgaccgtgcgccagtcgcacggcggctcgggcaagcaggcgcgctcggtgatcgacgggctggatgccgacgtggtgacgctggcgctgggctatgacatcgacgccatcgccgacaagggcctgatcaagccggactggcagaagcgcctgccgcacaacgcctcgccgtacacctcgaccatcgtgttcctggtgcgcaagggcaatcccaagggcatcaaggactggggcgacctggtcaagccgggcgtgcaggtgatcacgcccaatcccaagacctcgggcggcgcacgctggaactacctggcggcgtggggttatgcgctgcgccagccgggcggcaatgacgtcaaggcgcgcgagtttgtcggcgagctgctcaagcatgtgccggtgctggattcgggcgcgcgcggtgccaccaccacctttgtcgagcgcggcctgggcgatgtgctgatcgcgtgggagaacgaagccattctggcgatcaaggaactgggcccggacaagttcgacattgtcgcgccgtcggtgtcgatcctggccgagccgccggtggcggtggtcgacaaggtggtcgacaagaagggcacgcgcaaggcggccgaggcctacctgcagttcctgtacaccgacgagggccaggagatcgcggccaagaactactaccgcccgatctcgcagaaggtggcggccaagtacgcggccaacttccccaaggtgaagctgttcaccatcgatgaagccttcggcggctggcagaaagcccagaagacccactttgccgatggcggcacgttcgaccagatctaccagcccggcaagaaataacccacgagaccggcgcgccgggccgcgtggggcggccgcggcgccgaccggtccatcagaagaaggaagcgcgatgtccatcctgacgctctccggcagcccgtcggtccagtcccgctccggcctggtgctggcgcacctgcgtgccacgctcgaggctgccggcgaacgcacccgccacctcgacctgcgcgaactgccggcgggtccgctgctggcggcacgcgtggacgaccccgtcatcgccgccgccacgcatgccgtgtccgaggcgcaggtggtggtactggccacgccggtctacaaggccgcctacagcggcctgctcaaggccttcctggacctgctgccgcagaccggcctgcgcgacaagatcgtgctcccgattgccaccggcggcagcctggcccatgcgctggcgatcgactacgcgctgcgcccggtgctgtccgcgctgggctcgcgccagatcctgcccggcatctttgccgtggaccagcagatcgaatcctttgacgccgccggcgtgcgccaggcgcgcttcgatgccgcgctgtccgcgcgcctggacgagggcgtgctgcgcgtgcgcgatgcgctggcgcattcccgcatcgaggtgccgctcgacgtggtgcccggcgccctggtccagcgtgccgccgcgatcgcggtggccgagcgatgttccgcctgaactgactgattgactgaagtggcgccggcctgcccggcgcgacggcagcgacgccatgccacccgccacgcggggccggcagggatgcgtgctgccgcagccatcctggacatcaatccggccagcagggcattgccccgggccatggaggacatcgcatgacactgacgaacccgttgcgcacggccaaccagcgccgccgcctgattaccgccgcgctggtgcttgccaccggcctggcctatgggctactgcccggccgcgccgaagcgcagtcgaagaacatcgaccccaaggtgctgcgcatcggctaccagaagtacggcacgctgacgctgctgaaggcgcgcggcacgctggaaaagcgtctggtgccgcaaggcatcaccgtcaaatggaccgagttccccgccggcccgcaactgcttgaggggctgaacgtcggtgccgtcgatttcggcaccgtcggcgaggcgccgccgatctttgcgcaggccgcgggggcgcagctggtctacgtcggcaatgagccgccggcgccggtggcggaagccatcgtcgtgcccaagggctcggcgatccgttcggtggcggaactgcgcggcaagcgcgtggcgctgaacaagggctcgaacgtgcattacctgctggtgcgccagttggagaaggccggcatcccttacaacgagatccagccggtctacctgccgccggcggatgcgcgtgccgccttcgagcgcggcgcggtcgatgcctgggtgatctgggacccgttcctcgccgcggccgagaagcaactgggtgcgcgcgtgctcgccgatggccgcggcgcggacggcaagaacgtggtcagcaaccaccagttctacctggcctcgcgcccctatgcacaagccaagccggagatcgtcagcctgatcctggacgaactggccacgctgggcacctgggcgcaaagcaacccaaaggaggccaccacggtgctgaccggcgaaaccgggctgccggccgatgtgcttgagctcgccgtttcgcgcttctcgtacggcgcacgcccggtcagcgccggggtgctggccgagcagcagcgcatcgccgacgccttccactcgctcaagctgatccccaggccagtcaaggtggccgatgcgcgctgggacgtgccgcagcagcaggcgaagcgatagccacctccatcggcaagaacaataggacaacgacatgcaagtattctggttcatccccacccacggcgacagccgctacctcggcacttcggaaggcgcgcgcgaggtcagcttcgattacctgaagcaggttgccgtcgccgccgatacgctgggctacgaaggcgtgctgatcccgaccgggcgctcatgcgaagacccatgggtggccgcatcggccctggccgccgtcacgcagcgcctgaaattcctggtcgcggtgcgccccggcctgatggcgccgacgctggctgcacggatggcggcaaccttcgaccgcatctccaacggccggctgctgatcaacctggtcaccggtggcgataccgccgagctggaaggcgatggcctgttcctggaccacaccgcgcgctacgaggcctcggccgagttcctgcgcatctggcgccaggtgctggccgccagccatgacggcgacaaggtggactacgagggcaagcacctgagcgtgaagggggccaccgtcctttatccgccgctgcagcaaccgcatccgccggtgtacttcggcggttcgtcggcgccggcgcatgcgctggccggcgagcaggtcgatacctacctgacctggggcgagccgcccgctgacgtggcgcagaagctcgacgacgtgcgccggcaggccgcgcgtcatggccgcacggtgaagttcggtatccgcctgcatgtgatcgtgcgcgagaccgaagccgccgcctgggctgccgcggacgacctgatcagccggctcgatgacgagaccgtggcgcgtgcgcaagccgtgttcgccaagatggattccgaagggcagcgccgcatggccgcgctgcacgcgggcggcgcgcgccgcacgcgcgaggcgctggagatcagccccaacctgtgggctggcgttggcctggtgcgcggcggtgccggcaccgcgctggtcggcgatccgcacaccgtggccgagcgcatgcgtgaatacgccgagctgggcatcgacaccttcgtgctgtccggctacccgcacctggaagaggcctaccgctttgccgaactggtgttcccgctgctgccgcgctcggtgcgcgacaagctgccgggcaaggtgctgttgggcccgttcggcgaagtcatggcgactggcatcgtgccgcgcgccgcgcagagctgaggggagggcaaccatgaacgctcctctattgcagccgctgcgccagggacctcgggcgctggcgcgcgcgctggctccgtggatcgtgccggtgctgctgatcgttgtctggcagctggcctcgcagaacggctggctctccagccgcgtgctgccggccccgctggccgtggtgcaggccgcgtgggagctggcgcgctcgggcgacctgtggaagcacgtcggggtcagcacctggcgcgcgctggtggggtttgccatcggcggcgggctgggcctgctgctggggctgctgaccggcaccttccgcaccgcggccacgctgctcgacagctcgctgcagatggtgcgcaatatcccggcgctggccttgatcccgctggtgatcctgtggttcggcatcgacgagaccgccaagctgttcctggtgtcgctgggcgtgttcttcccggtctacctgaacacgtatcacggcatccgctcggtcgatacggggctggtggagatggcgcgcagctacggcctgtccggctggcagctgtaccgcgaggtcatcctgcccggcgcgctaccgggcatcctggtaggcgtgcgtttcgcgctcgggttgatgtgggtggtgctgatcgtggcggagaccatctccgcgcaatcgggcatcggctacatgaccatgaacgcgcgtgagttcctgcaaaccgacgtggtgctggtgggcatcctgctctatgcgctgctgggcaagctggccgactggctgtcgcgcgggctggagcgctactggctgcgctggcatccgggctacgccgcggcctgaccggcccgtcgtcccaatcaagcaaggagatcgagatgcagatgtatccggtagagcaggctgcgctggtggaactggaagcgggcctcgcgcgccgcgaggcggcacagccggcggcagaggcgccgcgcaaggcaggtggcgtggcgctgcacgtgcgccaggtggtcaagcgctatgacggccgcgaagtgctgcacaacgtggcgctggacgtggcgccgggcgagttcctggcgattgtcgggcgcagcggctgcggcaagagcacgctgctgcggctggtggcgggactggaagcagccgatggcggcagtatcaccgtcgacggtgaatccgcggcgaaaggccgcgcgcggcacgccgacgtgcgcgtgatgttccaggacgcaaggctgctgccgtggaagcgcgtgctggacaacgtcgcgctgggcctgccgcgcacacgccgcggtgaagccgccgatgtgctggcgcaggtgggcctggccgaccgcgccagggagtggcccgcgcggctttccggcggccagcgccagcgcgtggccctggcgcgcgcgctggttcaccacccgcagttgttgctgctggatgaaccgctgggcgcgctggacgcgctcacgcgcatcgagatgcaggggctgatcgaatcgctgtggcgccgccttggcttcacggcgctgctggttacgcacgatgtgtcggaggcagtggcgctggccgaccgcatcgtgctgatcgaggacggccgcattgccatggatgagcgcgtggcgctggcgcgcccgcgcgaacgcggcgcggcgggctttgcgcagctggaggccgcggtgctgaagcgggtgatgcggcaagcgccgcaggcgcaggtaccgtcgcatgcaggtgcgcatgccgacccggccgccacgaccgcgccgctgaacgtgagctgggcagcgtgaccgtgccacccgcggcaatgtgcgccgcgcatatcgacaggccgtaatcttcattcgctcgcgcgcgctgacctcctatcatgagcaggcaggccgatgcggtgcgaccgcacagagggcgcatggcgcgcccgtcatcactaatccgaccaaggggccgaggggcccggtcaacccaaggaatgccatgccaggcgtgcatgaacccgcgggcgcagtgcctgcgctccaacgttatctggaatcgctgccgcgccagcctctggctgaccggcaattgtggcgcgacgcgcgcgggcaggtgcagggccagttcttcaactgctcgctgaccagcgcgttcgagccgctggtgacgctggcagaccggcaggtggtggcgcatgaaggttcgatccacacctacgcagaggacggcgtgggcctggcggcatggaagctgtttgcgatggcggccgacgacaacagcctggtgtcgctggaccggctttcgcgcctgctgcatgccatcaactactttgccgccgagggcgagcacaagctggtgctgaacgtgcataaccggctgctggccgccgtcaccgacgaccacggcgctgccttccggcgcgcattgcagtcgctggggctgccgctggagcgctttgtgatccaggtgccggccagcgccaatgacgacctggcattgctattgcatgtcgttggcaactatcggcgcaacggcttcgcggtaagcctgcaggcgtcggatccggcggaagccggtgcgctgatggcgcacgcgttgccggactggctcaagctggacatgcgccgcacctggaccgaccgccagctgtcgggcctgcgtgccagcgcggccaacgccggcgtaacgctgatcgggcggcgcctgcagaacgccgaaagcgtcgagcgcctgcaggccgcgggcatcggcctggggcagggcgccttcgccggcgcgccggtcagtgcggcagggctgcgcacaggcctggcgagcgccgcgcatgcattggacaaggaggtggtatgacccaagcgaaccggctatccggcggccatggcacgcgcctggacattccgcggcacctgcaggtgctgactgtaccggggctgcacggcagcggcccgggacactggcagagccgctgggagcagcgcttccccgactggcagcgggtggagcagcacgactggtcgcgccccagcctgccgctgtgggccgagcgcgtctccgaaggcgtgatgcgcgcccagcgcgtggccgcgcgcggcgcggtgctggtggcgcacagcttcggctgcctggcgtcgttgcgccaggcggcgctggatccggtcggcattgccggcgcattgctggtggcgccggcagatccggacaaatttggcgtggcggcgctgctgccgacctaccggctgccgttcccgaccatcctggtcgccagccgcaacgacccctggatgccgcagcgcaccgctttcagctggggcacgctgtggggcagtgaactggtcgatgcgggcagcctgggccacatcaatgccgattccgcactgggcgagtggcctgaaggcctcgcgctgctcgataccctgatccagcgtatcgcgcaggcaggcgataccggctccataagtgaatcatccggcgcctgggagtcgggcatcgaggtagtgtctactatcccttatatctaaaccgtctaagaaaattcataaagattcgttctgtttataaggatgactctgcagaatctgtctcgtaggccggcgcaatatgcgctggcgtcataaagaacggcccgccggggccagccatcatggtccggcggcgcaccgctcacagacgagacgacatgcctccatccatttccctcgcggacacgccgccagccgcccctcgcgcccctgattccggcgccgcgcgcgcgccgcgcaggccgtccaggcagcgttttacggtgctgcccggcttcggcctgtcgctgggcttcacgttgttctacctgacgctgatcgtcctgatcccgctgtcggccacgttcctgaagaccttcacgatgacgtgggacgcgttctggacctcggtcacggcgccgcgcgtggtggcgtcgctgcagctgagctttggcgcgtcgctggtggcggccatcgtcaatacggtgttcgggctggtggttgcctgggtgctggtgcgctaccgcttcccgggcaagcgcctgatcgacgcgctggtggacctgccgttcgcgctgcccactgcggtggccggtatcgcgctgacggcgctgtttgccggtaatggctggatcggccgctatctcgagccgcttggcatcaaggtcgcgtttacgccgctgggcgtggtggtggcgctgacctttatcggcctgccgttcgtggtgcgcacggtgcagccggtgctggaggatgttgagcaggagctggaggaggccgcttccagcctcggcgccaaccgcctgcagactttccagcgcgtgatcctgcccgccatcctgccggcgctgctgacggggtttgcgctatcgttcgcgcgcgccaccggcgagtacggctcggtggtctttatctccggcaacatgccgatggtgtccgagatcgcgccgctgatgatctattccaagctggagcaatacgactacgccggcgccaccgcggtggcggtggtgatgctggtgatttccttcgggctgctgctgctgatcaacctgctgcaggcctggacgcgccgccatcaatccggtgtgcgcgccgcgctggcacctgaagcgcccgccacgggcaaggagttctgacatggccggcgcagttgcgggacgcctgggcgggcaagccaacgcccaggcccatcacaggtttgacgctaccggcgaagcgccgtgggtacgctacacgctgatcacggtggcggtgctgttcctcacgctgttcctgttcgtgccgctggcttcggtgttctatgaagccttgcgcaagggcgtgcagacctactgggaagcgttgatcgaacccgacgcactcgccgcgatccagctcacgctgacggtggcggcgatcgcggtgccgctgaacgtggtgttcggcgtggcggcggcctgggccatcgccaagttcgacttccgcggcaagaacctgctgatcacgctgatcgacctgccgttctcggtgtcgccggtgatttccggcctggtctacgtgctgctgttcggtgcgcagggctggctgggaccgtggctggaagcgcacgacatcaagatcatgttcgcggtgccgggcatcgtgctggccaccatcttcgtgaccttcccctttgttgcgcgcgagctgatcccgctgatgcaggcgcagggcagtgaagaggaagaggccgcgatcgtgctgggcgcctcgggctggcagaccttccgccatatcacgctgcccaatatccgctggggcctgctgtatggcgtgatcctgtgcaatgcgcgggcgatgggcgagttcggtgcggtctcggtggtatcgggccatatccgcgggctgaccaacaccatgccgctgcatgttgagatcctctacaacgagtacaacttcgcggcggcctttgcggtggcttcgctgctgacgctgctggcgctggtcacgctcggcatcaagacgctggtggaattgcgcgcccgcaaggaaaccgaagaggctgcaccagagcggccgctggcaagtttgcaaggacaagcatcatgagcatccaggtcaagaacgtagagaagcgctttggcgactttgtcgcgctggacaacgtctcgctcgatttcgacgaaggcgagctgaccgcgctgctggggccgtccggctgcggcaagaccacgctgttgcgcatcatcgccggcctggagcgcgccgatgcgggccagatcgtgctggccgggcgcgatgcctcggaccagcatgtgcgccagcgccaggtgggctttgtgttccagcactacgcgctgttcaagcatatgagcgtgttcgagaacgtggccttcggcctgcgcgtcaagccgcgcgccgagcgcccgagcgaagcgcagatccgcgacaaggtgcgttcgctgctggaactggtgcaactcgactggctggccgaccgctacccgtcgcagctctccggcggtcagcgccagcgtatcgcgctggcgcgcgccctggcggtggagccgcgcgtgctgctgctggacgaaccgttcggcgcgctcgacgccaaggtgcgcaaagaactgcgccgctggctgcgccgcctgcacgatgaactgcacgtgaccagcgtgttcgtcacccatgaccaggaagaggcgctggaagtggccgaccaggtggtgctgatgaaccgcggccacgtggagcagtacggctcgcccgaggccgtctacaaccatccggccacgcccttcgtgttcggcttcctcggcaacgtgaacctcttccacggccggctggaagtgggcgagagcggcggcctgctgcataccggtgaagcggtgctgccggtggtcggcagcggccatgagaccgccggcgacgcggtggcctatgtgcgcccccatgacctcgacctggaacgctattcgcccggcgccgacggcattgccgtgacgctgcgccgcgcgctgacgctgggcccggtggcgcagcttgaacttgaacgtgaagacaaccaggacgtgattgaagtcgcgctgccgctggagcgcttccgccatgcgggcttccgcgaaggcgaactgctcgcggtgcgcccgcgccagctgcgcgtgttcacgcaaccgcgtaccacgtccacccaacaagaaaaggcgacgtcatgaacttccagcaactccgatcgatccgcgaggcggtgcgccgccagttcaacctgaccgaagtcgccaacgcgctctacacctcgcagcccggcgtgtcgcgccagatccgcgagctggaagaagaactgggcgtggagatcttcgagcgctacggcaaacgcctgaccggcctgaccgagcccgggcgcgagatcgtgcgcatcgtcgaacgcctgctgctggaggccgagaacctgcgccaggccggcgacgaatacgccggccgccataccggccgcctgaccgttgccaccacccacacccaggcacgctatgcactgccgcgcgtggtgcaggccttccgccgcgaatacccgcatgtgacgctggcactgcaggaggcgtcgcccacgcatatcgttgagctgctgctgacggggcaggccgatatcggcatcgccaccgaggccctggccaccgaggccgggctgacctcgttcgaggcctacagttggcagcacgtgctggtggtctcgcccggccatccgctcacgcgcctgcccgagcccacgctcgaagacgtggccggcttccagctcatcacctatgacgccggcttcaccggccgccgcaagatcgacagcgcctttgccgaggccggcctgcagccggagatcgtgctgaccgcgctggatgccgacgtgatcaagacctacgccgaactggacctgggcgtgggcatcattgcctcgatggcctatgacgagcgcaaggattccggcctggtgcggatctcggccgaccacctgttcgcgcccaacaccaccagcgtggcggtgcggcggggcgcctacctgcgcggctatgcgcacgcctttatcaacatgttcgcgccgcacctgtcgcccgacaccgtcagcagcgcgctgtccgagcaggagcgccaggccctggcggcctgattccggcctggctgtggccatcgccaggcggcgcagggggcacccgggcgctgcctgacagccgccgtccgccccggcacggtgccgttcgcgccccgtgcccgccgttcgtcgcaagagactttcttcgtgcccgggtgaggggtacattccttgcacgtgcccgcggcttgccatccggcgagcgccgtacgtgtaccgcagtgcaacaaagtttgcgcgcggccgccggtctgcaagggccggacaagggagacagagacgatcatgcgcgacgacgaaccgctgctgcgctggcagtggcgcggctatgcccgcaaccaccagcatccccgcaacctgctgctgcatatcgtggccgtgccgatgttcatggccggcaccgtgctgggcctctacggcctgttgcgcctgagcctgccggcggtggcgctggggctggtgtgcatgggcatgtcgatggccctgcagggccgggggcaccggctggaagcccacgcgccggaaccctttgccgggccggcggacatcgccggccgcatcctggccgagcagtggatcaccttcccgcgctatgtgctgtccggccaatggtggcgcgcgctggccggccggcgtgccgggcagggtggctgaggtggcccgcgctgcccgcctcatcacattcccgttgcgccaggctcagtccgcgctaacatgaacgccatggaccgctgcttctccaacgtcgccaccgccatcccctcccggctcaatatcctcggccgcgacctgctgttcgtgctgtgcatgaactcggtgatcgccatcagcctgaactacggcttccagaccggcggcagcctgtggcacaactttgtctacagccagctgatcggcttgtcgatctgggtgctgatcgacattccgcgcgtggtgatctggtggaacgaccggccgcgccgctggcccttcctgctgctggccgccgccgcggtgcccgcgggcgtggtgttcggcagctgggccacgcgcgtggcgctggacctgccgcccaagtcggcggacgaagccggcggcatgctgcgcatgtgcctggtggtgggcatgctggccgcggcctcgatgatctatttctactggtcgcgcgagaagctcgcatccctggagcgccaggccgcgctggacgccctgcagcgcgaggaagccgaaaagcagctggtgcgcgcacagctgatggcgctgcaggcgcagatcgagccgcatttcctgttcaactcgctggccaacctcgacgggctgatcgccaccgacccgcccgccgcgcgccagctgctgcagcgcctgatcggcttcctgcgcatgtcgctggcgcatacccgcgccgagcaatgcacgctgcggcaggagttcgagctgctgcgcagctacctggacatccagggcatgcgcttcggccagcggctctcgttcgacatcgacctgccgcgcgaactggcgaaggtggagatcccgcccatgctgatccagccgctggtggaaaacgcggtcacgcacggcatcgagccctgcatgatcggcggccatatccggctgtcggcgcgtgcggccggcgacaatgcggtgcaggtcatcatcgccgataccggcgtgggcttcggtcatgcctcgggcaagggctcgggcctgggcatcacccatgtgcgcgagcggctggcgcgcatctttggcgcggcggcctccatgcagatggaggagaacaccccgcgcggcgtggtggtgcggctgacgctgccgctggagcgcccggccgaagcgcccaccctgacccagacagtcaccagcgtgccggagggcatgccagtatcggccccagccatgcaacggctctgaggcgccccgcctgccagcaagcctgacaagacgaacggctggcaccgcccgtggcggtgccgctgacaacgccaggacccatccaccaccccaacgcccccatgaccccgacccttctgatcgccgacgacgaagcgctgctggcgcgcgtgctggaatccgaactgatgtcgctgtggcccgaggcccgtatcgtttccgtggtccacgacggcgtggccgcgctggcggcggcgcgcgagcaccagccgcgcgtggccttcctggatatccgcatgccgggcatgagcggcatggacgtggcgcgcgaactgatcgaattcgacaccccgccactggtggtcttcgtgaccgcatacgaccagttcgcgctggaggcgttcgagcgcgccgcggtggactatgtgctcaagccggtccagcgcgaacggcttgaggccacggtgcagcgtctgaaggaccgcctggccggccccgccgacgatgaagacaccgaggccgaagcctcgatcgcggagacggaccggcttggccagctgctggcgcggctggaatcgctggagcacgccacgccaggcccgggcggtgcgccgcagcggcagtacctgcgctttatcaaggcactggtggggcaggaggtgcgcatcatccccgtggacgaagtcatctacctggaggccaccgacaagtacgtcaacgtggtctccggcgccggcgaagcgctgatccgcaccagcctgcgcgagctgacccagcagctggacccggagcgcttctggcaggtgcaccgcggcaccgtggtcaacatcacctgcgtggccagcgcggtcaaccagtcgctgggacggctgtcgctgcggctgcgcgaccgtcctgaactgctgccggtggcgcgacagtacgcgcacctgttcaagcagatgtaagcgcggttggcgggaggcgtggccgccacctggctgcagaggacaggggttttcctctatgatgcgggcttcggcccgtatttttttgggctgccgccttccgtcctgccgcatagcccctgccaccagcgccatgtccaccgccgcactcgatcccacgcgcaaccctcttcgtcatgacgcccaggtgatcgggctggttggcctggctcacggggtctcccacttctaccacctgctgctggctccgctgttcccatggatcaaggcggaattcggcctgagctatgccgagctgggcctgctgatgacggtgttcttcgcggtctcggcggtggtgcagaccgcgtccggctttgtggtcgaccgcttcggcgcgcggccggtgctgtttgccgggctggccttcctgggcgccgcggccttgctgctgtcgaccagttccggctacgccgcgctgctgttcggcgcggccgtggcggggctgggcaatggcgtattccacccggccgacttcacgctgctgaacaagcatgtgttgcagccccggctgggacacgcgttttcggttcacggcatttccggcaacctgggctgggcggcggcgccgctgttcctggtggcgatcgccaacctcgccagctggcgcgtggcgctggcggcggcctcggcagtcgcctttatcgtgctggccgtgctggtagtgctgcgccatgtgctggacccgcgcgaagtgcagggcgccgtgggccggcccgcggccaaggctgcggccggggtggccacatccggcggcagcgtgctgggctttctgcgcctgccgcaggtgtgggtgtgctgggccttcttcctgctgaccacgttctccgcggccggcatccagagctttgccccgaccgcgctgacctacctgtacggcatgccgttcacgctggcgaccgcgtcctacaccatctacatgctgtgcagcgccggcggcatgatagtcggtggctttgccgccggccgcaccagcaaccatgaccggctgatcgcggtgagcttcacggtatcggggctgatggcggtgctggtcgggttgaacctggtgccggcgctgctggtgccggtgctgatgggcgtgatcggctttggcgccggtaccgccgggccgtcgcgtgacctgctggtgcgcgccgccgcccccgccggtgccaccgggcgcgtctatggcgtggtctactcgggcctggatatcggcctggcgtgcggcccgctgttcttcggtgcgctgatggatgcaaagctgccggcctgggtgttcttcatgatcggcggtttccagctgctgtcgatcttcaccgcggtgacagtgggcaacggcaaccgctcgcgccgcggcgcggcggcgggccaggcggaggccgcctagcccgggccgggccacccaagcaccgccttccgaattcgattgcctgaggatgctttcatgtcaatgacgccggccaacaccacccagcctgacgatcccgaacacggcacgccgctgccgggcggccatatcctggtcgatgcgctgctggcgcacggcgccgagctggccttcggcgtgccgggcgaaagctacctggccgtgctcgacggcttccaccgccgccgcgatcagttgcgcttcatcatctgccgccaggagggcggggccgcggtgatggccgaggcctacggcaagctgaccggccgccccgggctggccttctgcacgcgcgggccgggcgccaccaatgccagtatcggcgtgcacaccgccttccaggactcgacgccgatgattctgttcatcggccaggtcggcaccgacttcatggaccgcgaggccttccaggaaatcgactaccgccgcatgttcggccagatggccaagtgggtggcgcagatcgaccgggtcgaacgcatccccgaatacattgcgcgcgcctaccagaccgccacctcgggccgtccgggcccggtggtgctggcgctgcccgaagacatgctggcgcagactgcggtagtgccgcagctgcaggcctaccagcgcgtcatgagctggcccggcgaggccgacctcgcgcggctggccgagatgctcgacgccgccgagcgtcccttcgtgctggccggcggcagcggctggacgccgcaggcctgcgccgacctgcaggcctttgccgagcgcttcgcgctgccggtgggctgcgccttccgcggccaggacctgttcgacaactgccatcccaactacgccggcgatgtcggcattggcatcaacccagcgctggccgagcgcgtccgcaatgccgacctggtgctggccatcggcccgcgcctgggcgagatgaccaccggcggctacgcgctgatcgccgcgccgcggcccgcgcaaaagctgatccacgtgcacgccggcgccgaggagctgggcagcgtctaccaggccgacctgatggtccaggcgtcgatgccggccattgccgcgcgcctggccggcctgcagcccacggccgagccgcgctggcaggcgtggacagaagccgcgcacgccgactacgaacgctacctgcagccgcccccatttacgggacagggggtcgacatggccgaagtcatccgcacgctggaccagctgctgccggccgacgcggtcgtgaccaatggcgccggcaactacgccggctggctgcaccgctatttccactatcgcccgttcaccagcggcggccgcggccagctggccccgaccagcggcgcgatgggctatggcgtgccggcggcggtcggcgccaagatcgcgttcccgcaacgcaccgtggtggcgttggccggcgatggctgcttcctgatgaatggccaggaactggctacgtcgatgcaataccaggcgccggtgatcttcatcgtcgtcaataacggcatgtacggcaccatccggatgcaccaggaacgcgaatacccgacccatgtctcgggcaccgagctgcacaaccccgactttgccgcgctggcgcgcgcctatggtgcgcgcggcgccaccgtgaccacgaccgaagcctttgccccggcactgcgcgaggcattggccgcaccggtatccacgctgatcgagatccaggtggacccggacgtgatcacgccgcgcaccacgctgagcgccatccgcgcgcaggcgctggccagccagcaacagtgaggccgagcggcccgaccggatactttcttgcctatcaggagaccatcgatgaagcctgtcaccaccgacctgtgcgacgcgcatgaagaccgccttgccgacggcaccctgcgcgtgatggcgccggtgttccgcgccttcggcaagcagggcgcctttgccggccccgcggctacgctcaaggtgttcgaagacaactcgctggtgcggaccgcgctggaagcgccggggcagggccgcgtgctggtgatcgacggtggcggctcgctgcgctgcgcgctggtgggcggcaaccttggcctgctggccgagaagaacggctgggtcggcatcgtcgtcaacggctgcatccgcgataccgccgagctggacgtgtgcgacatcggcatccgcgcgctggccgtgcatccgcagaaaagccagaagcgcaacgttggcgaaagcgacgtcgcggtgcagatgcccggcgcagtggtgcgcccgggcaactggatctacgtcgacgccgacggcgtgctggtctcggacgaaaggctggggaactgagcatgccgcgcgtctttgtctacggcacgctgcgcgccggcgaggtcaacgacctgaacgccgccgcgcagcgccacggcattgccgcgcccacgctgctgggcacgggtacggtggccggcaggctctatgacttcggcacctatcccggcctggtgctggacgccagtggcgggccggtcgtgggcgatctctacgagatcgccgacgcgctgttgccggtgctcgacgagatcgaagaggtttatcccggccaggccacgctgttcgtgcgcgaggaacgggccgtgttgcacaacggccagccagtcgcctgcctgctgtatccggtggccgagtccgcggtggccacgctgccgcgcatcgacagcggcgactgggtggcctatcgccgcgcacgcgataccgccgcggcctgagccccggctcgtttcaaacggacggcgcccattcgcggcgccgtttgcttttgcgtagcatggccggcgatgacatcgaacaatggaatcgacggccatgaacgctccgcaatccctgccgccgcaggtcttcccccggcagtgctttatccacgccggcgacgtgcggctgtgcgccaccagttggggcgagcccgggccagggcggcccaccatcgtcctggtgcacggctatcccgacagcagcgaggtctggcacgacgtggcggcgcagttggcggggcgcttccacgtggtggcctatgacgtgcgcggggcagggcgctcaaccgcgccgcgcgcgactgacgcttaccggctgcagaagcttgccgatgacttcatcgcagtcatcgacgcggtctcgccgcagcgcccggtgcaccttgtcggccatgactggggttcgatccagagctgggagttcgtgaccgatgctcggctgcaagggcgcatcgcctcattcacctcatgctctggtccctgcctggaccacgcggcaatcggcttgcgcgaactgcgcgggcagcggtcgctggctgcgttgggcaagaccctgcggcagctcgcagcatcgtggtatatcggcgccttccacctgccgtggctgcctgaactgacctggcggctgtggctcggccgtgcgtggccgcgctacctgcgcctgaccgagggcctgcgcacggggcccagccccacacaaacagccgacggttgccatggtgtgcgcttgtaccgtgccaacttcgtgcccgtactgcgtgccccgcgccactgtcatgcccatgcgccggtgcaggtgatcgtgccgttgcatgaccggtatgtgaagccggcgctaactgaagacgtgcaccgctggaccacgcaactctggcgccgcaccgtgcccgcgcaccattggctgccgctggccgacgcccagggctttgccatcatggtgcgggaatttgtcgagcatatggaaggggagccggcctcaccggcgctgctggccgctcgcctgcgctagcgaaggcagcgcatcctgcgcatatttcacgatgtggaaagatgttttggaccgcaaaaatacatggtttgcggagcacaaggccatttctcatgatggaagatcatttcccgcatcgtgaaataaaatctataagccattgaattattgtaagaaaaaaactaagcgaggactgcagatcaatgttgttgcaacgcgggagggttctctacactcttatataagactcatgacatgaggcgcgaaaaacagcaggcgacgcagccaccgcgacgtagcccaggtcaggtgatcaacagattctcagccatccccgcatcatcaggagagtgaccatgacccgccaagaacagatccaggccctgcagaaagactgggataccaatccccgctggaaagggatcaagcgcaatttcaccgccgaagacgtggtgcgcctgcgtggttcggtccaggtcgagcacaccctggcccgccgcggttccgagaagctgtggaacctgctgcacacggagccgttcgtcaactcgctcggcgcgctgactggcaaccaggccatgcagcaagtgaaggccggcctgaaggctatttacctgtcggggtggcaagtcgcaggcgacgccaacctggccggtgaaatgtaccccgaccagtcgctatacccggccaactcggtgccgcaagtcgtcaagcgcatcaacaacaccttccagcgcgccgaccagatccagtggagcgaaggcaagggcgacaccgacttcttcgccccgatcgtggcggatgccgaagccggcttcggcggcgtgcttaacgctttcgagctgatgaagtcgatgatcgaagcgggcgccgccggcgttcacttcgaagaccaactggcttcggtgaagaagtgcggccacatgggcggcaaggtgctggtgccgacccgcgaagccgtcgccaagctgaccgccgcgcgcctggccgccgacgtctcgggcgtgccgaccctggtgatcgcccgtacagacgccgaagccgcggacctgctgacctcggacgtggacgacaacgacaagccgttctgcaccggcgagcgcaccgtggaaggtttctaccgcgtgcgcaacggcctggagcagtcgatctcgcgcgccctggcctacgctgaagtcgctgacctggtgtggtgcgaaaccggcaagccggacctcgagttcgccaagaagtttgccgaagccgtgcacgccaagttcccgggcaagatgctggcctacaactgctcgccgtcgttcaactggaagaagaacttggacgacgccaccattgccaagttccagagggaactgggcgcgatgggctacaagttccagttcatcacgctggccggcttccactcgctgaactactcgatgttcaacctggcctacggctacgcccgcaaccagatgagcgcgttcgtggaactgcaggaagccgagttcaaggccgccgagaagggcttcaccgcggtcaagcaccagcgcgaagtcggcaccggctacttcgacgccgtgacccagaccatcgaaggcggccagtcgtcgacgaccgcactgaagggttcgaccgaagacgagcagttcttcgaagacaagaaagtggcctgactctcctggtcacccccgccggaacgtgggtccggcggttaaggaaggcgtgcgaccatcacgccttctgatttaggcgccgcgccgttctctctcagggacggcgcgtttttttattttccaatgctgggggcgggttagcgggtagctgttcaacgggtgttcaaaactcaaactccatgcagagttaccgcccaagcctggccgggttcacgccggctatttagaagcctgacgcgggacaggtcaatgcccgcatcttccagagcggcgcgcattctcaagttatgtgtgccgccccttttgcttcgtgccttaccgccttttcaattcttcacaattggaaagttctgaagcgtcagcgcagtccatgtgtccgcacgtctttgcggaatagggatcctaacgcgatttcagtcttgcttaattctgttttcaggcgttttgggctgcgtaattaggaatcgtctgatttattccccacttcgctgctcctattatcgaggccgcgttgctgcactctcattggctggtcgatggacgaccgagccactggctgctgacggcggcgacagtccactttccacggagcgtgattgcatgggtagccgattgcggttttccttccgtaccgtcaccgtttccggcgacggtctgccggaactgttggggcagccattgctgctgttctccaaactgtccggcaccgagagtatcaattccctgttcgaatacgaactggaactgaagacgcccgacgaacgcaacgtgctatacgggccggcgggtgactttgatatggaggccatgcaaggcaaggagttgaccgtcagcatcgagctggacggctccggcaccggtccggatggcggcttcggcagcggcaagagagagattaccggcctcgtcacggacgtacgcggcccctactacgaacacgaacgcatcctgtaccgcctgaccctgcgcccgtggctgtggctggccacgctcaccagcaccatccggccttatcagaacatgactgtgctggaaatcgtggaggcggtgctcagcaaatacactttcccggtcgagcgccgcctgctggatagccagtatcccaagcgccgatttcagatgcaggccggcgagacggactaccagttcgtgcgccgcctgctcgcggaatggggcgtgaatttccactgggagcattcggacggccaccaccgcatggtgttgaccgatggcaatggcgctttccggaatatccccagccctgcctaccatgccattagctggtatccatcctcggaccgggcggacgaggaacaccttcacgaattcgaggtgcgcgaccggctcgtctcgggggcctgggcgcaaggcgattacgaccacaaccaaccgcgcgccgacctcaatgtctgcgccgccgacccgcgcgacaccagccacgcgacctatgagctgtatcactggccgggcgattacgccgaacccaagagcggcaacgatgcccgcaaggaaggcgagatgctggcgcgcatcaacatggaacgcctgcggcagcacggcgtacggacgcgcggcaagggtaatgtgcgcgcgatggcgtcgggccatacctttaccctcaagcgcttcctgcgcaccaaggccaactgcgagtacctgattttcgccacgcgcctgctgatcgaggacgtgggcgagttcgccggcagcggccagtcctggcgctgcgaggtcgagttcgaggcgcagcccactagcgaaatcttccggcctgaactggtcgaaaagccctacatcggcggtcatcacaaagccagggtcgtcggcccagccaatcaggaaatctggtgtgatgacctgggaagggtgcgctgtcaattcgtctgggaccgctatggcagctacgacgagaatagctcctgctggattcgcgtcaccggcttctcctccggcgaccgcttcggcaacacgcacctgcctcgcatcggccaggaagtcattgtcagctatgagggtggcgacccggaccggcccatcatcatgggaccggtcaataaccggctgaacctgccgccgtgggatctgccgagccagcatgccttgtccggctaccagagcaaggaactgttcggcgaaggccgcaaccacacgctttacgacgatacccagggccagcagcaggtgcaggtcgcgtcggaccaccagaacagcctgctggcgctgggccacaacgtccgcgtcaacgattgggaggggcgcaaggacaagcgcggcgaaggctttgagcttcgaaccgatgcgcatggagcactgcgtgccgcactcggcatgcttatcaccaccttctcgcgccggaacgccgaaggcaacatgatgaatgtcagcgatgtcattcaactgatgcaaaaggccctggatatcgccagcaccatgggcgacaaggcgaccgaggcgcaggcgcaggatggcgaacagcgcgacattgcaagattgctggaaaagcagtttgagcaaatccagggcggtggcgagctgaaggagttcacggcgccgcacctggtatcagcgagccccgctggcattgtctcgaccgcagcgggttccacgcacatcgccagcggcacgcatactgcgttgactaccggggagcacctgtccgtgaccacgggcgggggcttctttgccagcattcgcaaggcactgtgtctgttcgtatatgaagccggcatgaagctggttgccaacatgggcgacatcgacctgcaagctctcaagaacaatatcaacctgttggcaaagcttgaaatcaacgccactgccgggaagatcagcctcaaggcaaaggaagtgctgctcgacggcggtggcagctacatcaagctgaacgaaggcggcattgagaacggcaccaatggcgggtggatcgtgcacgcggccagcaagaacctgaccggtcccagcagtcttccggtggagctaaaggcgaggcaagtctgcctggaatgcctgctcaaggcggccgcacgcaatgccgccgtggttcctcgataaataaccaggaacagcagctcgatgacagaagaagaaagcgtagttcatatctacgtgctggccgatggcgccgtgcatccgactcgcattggtgcattgctgcgcgaatcgggcgccgattttcgaaatgtgtatgccggcctgcccgaagccgatgccggcgacgcctgcctgttcctggcgcgggtggacgatcccaaagcaccctggctggcgcaattcgacgcgatggatttgcgggcgccatgcttcacgctcatctggagccgcgtggacattgaccgcctcgcccgtcatttgcatcagtttctcgttgcggacattggcgaaggcatgaccgccctgattcgctactacgacccgcgcaacctgctggtgacgatggaagtctggggcgacgacatcgtggagcggatcatgcaacccattcagcaatggaaataccgcggctacagcgaggaatggcagtgcattgacgggccgatggagggcgagagcacgcaggatacgccgctttccatccagcttagccaggagcaactggaccgactgcggaacactgcgagccggatcagttgctcgcggcgctcgtagaggatagcgtggtggatggggcaggtccctatctcgcgcgcttcatggattttctgccccgttaccagcgtgccgccgagtgggggctgacagagccagcggatcgaatgtacttctgcgaactctcgtaccgatacggccgcgacttcgacgcccacgatgaaatgcgacgcgccttggaagagcgtgctcgttccgggcaagccatgatcgcctgcgcggatggggtgcatccatccgtctgggagcagttggcgaaaaatgcgaaccgggaggtcaacgcatgaaatccttgttcatgtcggccttgatggcggtatgcctcgcgattctgccaggctgcaatcaaagctccgttgttggcactctcccaaacgacgatcctgacgccctgatgtcaggcgatgttgagggcctgaactacaccccttactacgttcacaccttcaacatagcggggcacgacaacggcatcggaggcggcgggccaaacattgttccggtaagacccgactatataccgacagagagcggtggcgcctgctgtggcacgtttccggtccgctggcggccagggctaaaggtcacggtccgctggatcgccaacaagaaacttgatgggcacgcatggggttcctggtacaaggctgaggcggaaattcccgaatatggcacaaccacttatggcatgtgggtcattttcctgccaggagatcgcgtcaaggtcatggttatggatggaaatgcaaacggctacaacagggtaagggctcggcctgctgacgacgatccttacgtggcagtcgggcgggtggacgacgaagcgaatcgtgaggaagaggcagcgcgcttagtgagattcggcgaggtaattaaggcggacccatcaatcggagggttgaagtaatgaacgtattgcgttggccggagaaaatgccagagggcggcctgctttcgcccgcgccattgaggacccgcacggcaaatgcgacctgatcgagttgttttatctcgtcatgagccttgggttcatgggccgctatcgggtggaaaccgggggagaccggcagcatgagcatatccggcagaagctctacgaactattgaagtcacaacgtccgccggtgcgggatgcactatccggcgatctggaagtctccaaagaacggaacttccggccgctgtggggtattccagtctggatggcagtcaccgcatacgcgcttgcggctcttgtcgcttttggatatttcaaatatcaactatcgacccgcgcgcacgaagtcgcgcgggagatcgaggcgattggggacgcggcggcgtcagcgctgccccggtcactacccccacaagatgtcaaggttggcggcagcgaaacgggagatggcagtcgcaagcagtgattgcctgcgaacaggttggggggggcggccccgcttgagccgacatcgaagcactgggcccgcggcgggctcgaatttgctgaaacgcaataaattgtcacttttgccaagttgcggcatttgggtgattcccgccgtaagagagatggcttaaagtgccgtggcctttatcggcactttccgagctacccaccaagaacaacatcatgaaagcatctctctcgctcgcttcctgcgccatggcggccgcactgctggccggctgttccggcggcatgcccaccaatctcgatggcgtgatgagcgccggcacttcgctggccaaggctgccacgctgtccgatgccgacgtcaagagcctgtccgaccaggcctgcgctgaatcggacaagaccaacaagatcgccgctgccaacaccacctacagcaagcgcctggtcaagatcatgagcgggctgaagaacagcgacgtgcccaacgtcaacgccaaggtctacatgaccaaggacgtcaacgcctgggccatggccaatggctgcgtgcgtgtctacagcggcctgatggacatgatgaccgacgatgaagtgcgcggcgtgctgggccatgagctgggccacgtggcgctgggccacaccaagaaggccatgcaggtcgcctacaccgccacggccgcacgcggcgcggcggcagctgccggcaacggcgcggtggcggcactgtcgcagtcgcaactgggcgaactgggcgagaagctgatcaacgcgcagttctcgcagtcgcaggaaagcgcggcggatgactattccttcgacctgctgaccaagaacaaggccaacacgcgtggcctggtgacggcgttccagaaactggccaagctggacggcggcaagtccggcatgttctcgtcgcacccgggctcggaagaccgcgccaagcatatcgagcagcgcatcagcaaggcttcgtaagcggcctgcgcaagcaaaaagccgcccgcaccggtcatgccggtgcgggcggttttgctttgctggcgctgtgcgcccgggggtcagcggtagacgatcaccgggatgtcggtatgcgtcagcaccttctgcgtctcgctgcccagcagcaggccggacaacccgcgccggccatgagatgccatgaagatcacgtcgcagccatggcgctcggccgcgtcgatgatgcccaggtagggcaccgcaaaggtcgacatatcggcgtcgaaggtcacgcccgccgccgtggccaggttctcgacctctttcagatacagcttggcctggttctcgatgcggtccttgaaggcctgcggggcttcgaccacgatttcgctgaacggcgtgtaggggtactcctccaggcagacataggccgtgatgcgcgcgccgatggccttggcgagctccagcccgccgttgatggctttcttggagagttccgagccgtcggtgggtagcaggatatgttggaacatgcggggctccttttctgactagggatcggggcagggcagccagctggcatcggcggatgccggggcgccggtaagcgcctgtcacgaatccattgtagtcagtgtgccgagaagggcattgcgcggaatcaattgcaataaaagcgtctcagcacaccggcaggcgcctatccttcagtccgccaggacctcggcgaccggcgtgggggctgcggcctgttcggcccggcgccagtaggacgggttgccgtaggtgttcttcaggtgatcgataaacagccgcacccgcagcggcaggtgcttgcgctgtggaaacaccgcatggatgccgatcggcggcgcctggaactcgtccagcaccgtcaccagccgcccgctggcgatctcgctgccgacctcccaccaggagcgccaggccagcccgttgccttgcaggcaccactcatgcagcaccgcgccgtcgctgcattccatggtgccgccgaccttgaccgtgaccgcgcggccttcctcctggaacacccagccacgctgcacattggcgctggcgccaaaggcaaggcagttgtggcgctgcaggtcttccggcgccatagggcgcccggcgcgcgccaggtactcgggcgaggccaccaccacgcggcgcgtttcggccagccggatcgataccaggctggagtcgggcaggtcgcccaggcggatggcgcagtcgaagccttcattgaccaggtcgaccacgcggtcagacaggtccagcgtgatcgacacatccggatgcgactcaataaacagtggcaccagcggcgccacgtgcttgcggccgtagcccgccggggcggtcacgcgcaggtgcccgctggccttgaccccgcccgccgagacgctggcctcggcattgtgcaggtcgttcaggatgcgctggcagtcttccaggaaggcagagccttcaaaggtcaggctgatcttgcgcgtggtccgtaccagcagcttgacgcccaggcgctcctccagcgcgtcgatgcgccgcccgatgatggccggcgccacgccttcagccgccgccgctgcggaaaggctgccgcgcgacgcgacggatacaaaggtctccagttgtttgaagtggtccacaaatgtttgcctgatgtgcctgcggtgtgccggcacggtcacgcaagcggtggcgttgcgtccatatggccggcagtgaggaggatttggtgcggagttttgttttagtcagccaagattagttgcctaaaagtaaaagatcaagtgacccgcgaccactttgccgcactgcagcgtctccctacaattcgatgcattcaatggtgtacagagccacgcagctgtggtctgctcgtccatccacccagtcgcccgtaccgttgcaggttgcccaggccctcatgaacaagatccgcgcagtcgtcttcgatgcctatggcacgctgttcgacgtgtattccgtcaccgcgcgcgcggaacaactgttcccgggccgcggcgaggcgctggcgctgctgtggcgggaccggcagatcgactacacgcgcatccgcaccatggccgcccccgatggctcgcgctacaagccgttctgggcgatcaccgtggacgcgctgcgctacgccgccgagcgcctgaacctgacactggatgaagccgccgaggcgcagctgctcaaggaatacgcgtgcctgtccgcgttcccggagaacctgggagcgctcaagcgcctgcgccgcgccgggctgccgctgggcatcctgtccaacggcaatgccgagatgctggacatctcggtcaagagctccggcatgcatggcctgttcgaccacgtgctgtcggtggacgccgtgcgccagtacaagaccgcgccggccgcctacgcgctggggccgcaagccttcagcctgcccgccgaagagatgctctttgtctcgtccaacggctgggacgcctgcggcgccacgtggttcggctacaccacgttctggatcaaccgtgccggccatccggcggagcggctcgacgtagccccctccggcaccgggcacgacatgaacgacctgcttgaattcgtccgcgtccgtggcgtggcggtgtagcagggtcccttcaaccaagccttaccgctatcgatcacaggagaagactgatggctatcacgctgcccgcgggcatgaagattaccggcgagatcctgccggcctacgaagatatcctcacgccggaagccctggccctggtagacaagctgcaccgcgcctttgagccgcgccgtcaggaactgctggccgcgcgcgtggaacgcgccaagcgcctggacgccggtgagatccccgacttcctgccggaaaccaagagcatccgcgaaggcgactggaaggttgccccgatcccccaggccctggaatgccgccgcgtggaaatcaccggcccggtcgaggccaagatggtcatcaacgccttcaactcgggcgctgacagctacatgaccgacttcgaggattccaacacccccaactggcacaaccagctgcagggccaggtcaacctgaaggccgccgtgcgccgcacgctgaccctggaatccaagggcaagcaatacaagctgaacgacaagatcgccaccctgcaagtgcgtccgcgcggctggcacctggacgagaagcacgtcaccatcgacggcaagcgcatctcgggcggcatcttcgacttcgcgctgttcctgttccacaacgcccgcgagcagatcgcccgcggcgccggcccgttcttctacctgcccaagatggaaagccatctggaagcgcgcctgtggaacgacatcttcgtgatggcgcagaacgagatcggcctgccgcaaggcaccatcaaggccaccgtgctgatcgaaacgatcctggcggcgttcgagatggacgaaatcctgtatgaactgcgcgagcacagcgctggcctgaacgccggccgctgggactacatcttctcgtgcatcaagaagttcaagaacgacaaggacttctgcctggccgaccgcgccaaggtcacgatgaccgcgccgttcatgcgtgcctacgcgctgctgctgctcaagacctgccaccaccgcggcgctcccgccatgggcggcatgagcgcgctgatcccgatcaagaacgatccggagaagaacgccatcgccatggaaggcatcatcagcgacaagcgccgcgatgccaccgacggctacgacggcggctgggttgcccacccgggcctggtcgagccggccatgaaggaattcgtggcagtgctgggcgacaagcccaaccagttcggcaagcaacgccccgacgtgcaagtgaagggcgccgacctgctcgacttcaagccggaaacgccgatcaccgagcatggcctgcgcatgaacatcaacgtcggcatccactacctgggcgcctggctggatggcaacggctgcgtgccgatccacaacctgatggaagatgctgctactgccgagatctcgcgctcgcaggtgtggcagtggatccgctcgccgaagggcaagctggaagacggcaccaaggtgacggccgagctggtgcgcaagctgattccggaagagctggcgaaggtgaaggcactggtgggtggcgataccaagacctatgaccgggctgccgagatttttgagcagatgtctacgtcggaggattttgctgagtttctgacgctgccgctgtatgaggaagtttaagcgggtagggtgctagcaggatgaaaaaaccgcagctttggctgcggttttttcttttgggatgccgatcgagtgtccactcaactgttggagtcgttcaggaaggcggtcactcactggcacagcctccaaatgtgcgcagaacgtaagccttctgcgtcgaagccgccaacttacgggcgctggatgacgggggccacacgcatcgcttgcgcactacaatgctcctgtacaggcggcgtcctgagggagtctccagatgaccgacagcagcgtgaaatccaatcttcgcaatacgtgggagtcggcagcacccggctgggcgaagtgggagcatgtgtttgccaccaatctttcgggcgccacggacacgctcatcgatatggccggtatccggccgggcatgcgcgttctcgatctggcctgcggtgccggcagccagagcatccaggcagcgatgcgtgtgggtgccggcggcgaagtggtcgccagtgatatatcgggcaccatgctggagcatgtccgccgaaatgccgctcgtgccggtcttcagaatatcgaaacgctggaatgcgcagtagacgaattggacgagacactggcgccgttcgacgcggcgatgtgtcgattgggattgatgcttttcccgtcacctggtgaggcattggaatctgtccgacgcgtactcaagcctggcgcgcgtttcgcggcgctagtcttcacgacgccggccaacaatccctttatggcccagccgatggcgatccttctacgccacgcgggcaagtctccgcccgcccccggacaacctggaatcttcgcactgggaggcgatggcgtgatggaacgcctgatgaacgacagcggtcttggcgatgtgaaaacacagcatgttcgagcgcagctcgtcttgccgagcgcgtccgatgctctgcaactgatgcaggaagccgccggggcataccgggctgtggtagcggacctcgacgtcgcggcgagattgagggcctggaacgaggtttatgaatgccttaagcagttcgacgtcggtgaaggcttcaagaccgagcttgaactcatcatcggatcaggcgccaagccaggatagttttcgcccgttggagactgagggtcgcctacgggcttaatcgcgtcgcctcatgcgcgacacggtacgaccggaacgggaccgcaacggcgccgttcccggtcccgccggacggagcgtggttgcggcgcaggctatggcatagcctggaagaatgaaagcgtccgggcattggcccgttcggcggcgtcggcgacatagtggacgccctggtttcgcgcgaaggcgtgcatgcagccgggatacgtgtatatctcgacattgggcttgtccgacagcgccgcgacgatccgcgcccgcgcttccggcggcacgaattcatcttcctcggcgatatgcatcagcagcggcgtggtgaacgtcgcggcctcgccgagatgcttgtcgatgccgacgccgtagtaggagacagccgcttcggcattggtgcggactgcggtcaggaatgccagcagtccgccaaggcagtagccgaccgtgcccacgccgctggtaatgccgtccagccgccgcgtgaactggatggtcgcatccaggtcgcccacgcccgcatcgacatcgaaggcctggtagagcgccagggccttctgccattccgcatcgctcttgtcggtgagttcgacgttcggctgctggcgccagtagagatccgggcagatggcggtgaaaccgtgttgcgcgaaatgatcgcaggtggcacgcatgtcgtcgttgatgccgaagatctcctggatcaccacaatggccttgccgttggccgctgatgtcggcctggcaaggtaggcccggaagttgccgtccgctacgtcgatcgatgtgtactcgcccatgatgcctcctgttatgcgggggttttgcccatgcgggcagccgtcaatgtagcgcaattccccgtcagcgcgcgcccagcgcggagagcaatgcggcggtggtcaggatggcatgcgcgaacgtgggcccgttgatctcatgcgcggcatgcaaggcttccggcgagaatgccgcggtcgcgtcccgcaccagggtcacatggtagccaagttccgccgcgaaccgccccgtggcttcgatgcaggtgttcgccagcaagcccaccaggacgacctgccggatgccgtgctgcttgagctggaaatccaggtccgtgttggcgaagccgctgccgccccagtgctcatggacaatcacgtcgccggccatggggcggaaatcaggatgccagtctccgccccaggtgccttcggcaaagacctgcgcgcggctggcaccgagctggtaggggctggcgtgctgccagccgagatgctcgtccgggcgggcgcgatggtgcggcacgtagaacacctgtatgccgcgcgaacgcgccgcgctggtcaccgcacgcagatttgccagcgtcccgagtttgtccgccaccggcttggccaggccgttcagcttgccgccttcgctcaggaaatcgttgtacggatccaccagcagaagcccggtggactcgctggtgtaggcggggcctgtcatgatcgtcctccctggcactggcaatcgtgcctctgcgacactggtcagcgttgcacgaacgccagcagatcgttgttgatgagatccggatgggtcgtgcacatgccatgcgccaggcccttgtagaccttcagggtgccgttgcgcagcagctccgcgctcaacggggccgaggccccgatgggcacgatctggtcgtcgtcgccgtgcatgaccagcaccggcacgtcgattgccttcaggtcttcggtgaagtcggtttccgagaacgccttgatgcaatcgtattgggccttgaccccgcccatcatgccctgtcgccaccagttgtccttcacgccttccgagaccttggcgccgtcgcggttgtagccatagaagggcaccggcacttccttgtagaactgggcgcggtcggtggctacccgctcgcgaaagccgtcaaacacctccaccggcaagccccccggattggcgtccgtcttgaccatgatcggcggtacggcaccgatcaggaccgccttggccacgcgcccggcgccatgcttcgcgacatagcgtgccacttcacctccgccagtcgagtggccgacatggacagcgtccttcaggtcgaggtgcgcaacgagcgcggccacgtcggcggcgtaggtgtccatctcattgccgatggcggtctgggtggagcggccgtggccgcggcgatcgtgcgcaatgacccggaaccccctggccaggaagaaatgaagctgggcatcccagtcgtcggcggtcaggggccagccgtgatgaaagacgattggttgccccgcgccccagtccttgaagtagatctcggtcccgtccctggttgtaatcgttcccatggcttgctccgtctgaaggggattggaaagcccgcggcggctcgaggacccgatgtgtgcgatcgtcgccagcctgtgcgctggcggcatggcagcctgcttcacggtcggcaaccatcgcggtgacggccattattctcctggactctggccagacgctacgtaaaatcggcaaatcggatggtgcctgccgagcctgcgccaggtgtcagccatcccgccgcagggcactccaattcacttgagcgcaagagggtgacgatgaccaacgccagctatgcggagtttgatgaattcgaagcgtcactgtatggcgtaaacggccggtacatgctgcgctcggcgcagcgacgggactggcgcctgcgtgtgctcgagctgaatggcgttgccttgatggccggacaggaaggcgccgcgacgatctacagtggtgcaggcatgccgggatgcttcaacctgttcctgccgctgagcggacatgaatgcacggtggtcgacgggcgccggttcgaccgccatgcaatcggctggatggcgccggaccgcatgttccatatcgacgccagccgcccggcaagctggatgacaatctccatgccatgcgagctcgtctgccggtggatggcgacatacgcagacaatgccgacttgtcattgctcgcccgcaatcttgtcctgaccggcggtccaagcttgggcgccctgcttgcgctgacccagcgcctgctcttcatcgatgatcgccagcctgcccaactgcatcacccggctggcgagcagaccgcacgcagcgaactcctccggctcgcgttcaacaccctgctgccgctagccgcgcgtagcaccgacactgccaggcaccagaatcaccggcgcatcctgagccaggccatggacttgctggcagcggcgcggcacacgcccatcctgcttgaagatctgtgcgcagctaccagtgcctcggaacgtaccattcgcaacgtgttcaaccggtacgtcggcatcagcccccaccggtacctggtgctccaccgcttgcaccacgcgcgccaggcgctgaagcatgccaaggcaggcgagacggtcacgagcatctgtatgcgcttcggggtctgggacatcggccggttcgccatgcagtaccgccggctgttcggcgtgctgcccagccagacgctgcgcgcgtcgcatctcggcatgcaggcgccacactaggccgatgcccggcctgggtgcctactcgaagaacatctcgaagacctgcgtgcgcaaaaccactggatggccgcatcgcggtggtagcccgatcccatttttattgaccgactctggccggtttctgacgatcatcccatccgtgcccggcctgcctccggcaactgaaagagcgtttcacattgtggaatttgctccggctttcccccggcgctatctttcgttccttgaaaatgctttccacattgcggaatttagtgtttatctcattgaaaaataaggaaaaatcaactcttatgtcttatataagactttgccgcgacgcatcaagaacgccctacaatgaacccacgctgctcgcctcgacatccgccagcacactcaactatttttttcaaacgcgctttcttcttaggaaattcccatggcccagtatcaagacgacatcaaggcagttgccggtttgaaagagaaccacggcagcgcgtggaatgccatcaatcccgagtatgccgcccgcatgcgtgcccagaacaagttcaagactggcctggacatcgccaagtacactgccaagatcatgcgcgccgacatggccgcctacgatgccgactcgtcgaagtacacccagtcgctgggctgctggcacggcttcatcgggcagcagaagatgatctccatcaagaagcacttcaacagcaccgagcgtcgctacctttacctgtccggctggatggtggccgcgctgcgctctgagttcggcccgctgccggaccagtcgatgcacgaaaaaacctccgtcagcgcgctgatccgcgagctgtacaccttcctgcgccaggccgacgcccgtgagctgggcggcctgttccgcgagctggacgctgcccagggccctgccaaggccgccatccaggcgaagatcgacaaccacgtcacccacgtcgtgcccatcatcgcggacatcgacgcgggtttcggcaacgccgaagcaacgtacctgctggccaagcagttcatcgaagcgggcgcatgctgcatccagatcgaaaaccaggtgtccgacgagaagcagtgcggccaccaggatggcaaggtcaccgtgccgcatgaggacttcctggccaagatccgcgccatccgctacgccttcctggaactgggcgtggacgacggcatcatcgtggcccgtactgattcgctgggtgccggcctgaccaagcagatcgccgtgaccaacacgccgggcgacctgggcgaccagtacaattccttcctcgattgcgaggagttgtcggccgaccaactgggcaatggtgacgtcatcatcaagcgcgacggcaagctgctgcgtcccaagcgcctgcccagcaacctgttccagttccgcgccggcacgggcgaagcgcgttgcgtactggattgcgtcaccgcactgcaaaacggcgctgacctgctgtggatcgaaaccgaaaagccgcatatcgcccagatcggcggcatggtcagcgagattcgcaaggtcatcccgaacgccaagctggtgtacaacaacagcccgtcgttcaactggaccctgaacttccgccagcaggcgtatgacgcgatgaaggccgcgggcaaggatgtgttggcatatgaccgcgcccagctgatgagcgtggaatacgatcagaccgaactggcgaagctcgccgacgaaaagatccggaccttccaggccgacgcgtcgcgcgaagcaggtatcttccaccacctgattacgctgccgacctaccacaccgccgcgctgtcgaccgacaacctggccaaggaatacttcggcgaccagggcatgctgggttatgtggctggcgtgcagcgtaaggaaatccgtcagggcatcgcctgcgtcaagcaccagaacatgtccggctcggacatcggcgacgaccacaaggagtatttcagcggcgaagcggccctgaaagcggcgggtaaagacaacaccatgaaccagttctgataccagtaataccccaagcaaaacgccaaccgatacgggttggcgtttttttgtccggcgagatcgctcgcggggttctcatcaaacatattcttgtgcgcttccatgcagaagctgtacgtgtggcttgaaatcagcgtgctgggttgagacgcggatgcgtctcctctccccagtgatacagtacaaggccagacagtcccatcgcgatggcgacgaaccagaatgcactctcgacgcggccaccgagcgctgcagctgcgcccaggcagagcgcgccgatgccatacccgaggtcgcgccagaagcggtagatgccaatggcagacgcccgccaactggggtgtgcgatgtcggctaccgcagcgctcagattggggtacaacatcgccatgcccagcccggtcacggcggccgaggtgctccaccaaaccgagccgctgcctagcggcagcagggccacgccagcgccacacacccacatacccccgacattgaggcgctgacggccgaccttgtccgagaatctaccggtgaatagctgggcaccgccccaggtaaagccgtagacacccactatccagccaatgccgggcaggctcactccctgctggtgcaggtagatgggaaacaaggcccaaaccagcgcgtcaacgaacttctccactagcccggcctggcagagcgcggccattcgacggtcgcgccaactcatcaggacgaacatctcgctgctcgatggttgctcgcttacgcccggcgggtagcgtgggtgaagcactgtcgcggatgtgccggcggtgtggcgtttgacctcagcccgggcccagggcagcgtctccatcaccaccagccaggcgagcaatgtcgccagcccaatgacgacagcgccgaaccacagcaatccttcgcgcggacccgagatggaagccgcatagcccgtgaccactcctgccacggcgacacccacgtagccagagaattcgttcagcccgataaccaggccgcgctggtcggctcgcgtaatgtcgagcttggccgtctgggtcattgaccaggtcaggccctgattcacaccgagcaaggtagttgccaggacaatccagttccacgatggcgcgaaatagataagcagcggaatcggtagcgctacaagccatccgatgagcagcactcgtttgcggccgatgtgctccgccaggcgacccgcaacgaagttcatagcacccttgacgaagccgaatgccacgacgaaggccaccagtagcatgaacgacccacgtggcacgccgaactcggtctcggcgagcgccggtacaacgttgcgcatcatgccaatggtcatgcctacgaacagcacctgcagcagttgctgcagaatctggccaagattggcacgtatgccgaagtcaatcgagagcggcttcaatcgcgcgcaccttcgggcttaatgccacgcagattgacctctatgatgcgagccatgttctccggttgctgcgggatgtcggcaaccaccgcatcgacaaaggcatcgcgcgacattgcgagcatcgggttgaagcgtttctcgaacccgatggtcgatgcaggcttgccagaaaggcctgcgccgcaggcgctgccggcttgatgtccaggataaatctcaagctcggcagggagattcaacagcttgcgatgcaagctatcgtgcagtcgggcggccatttcgcgttctctcccggccaggtccggccggccggcacatccaaagaaataggaaaaggcggcgttttcagtgggacgttggcggaagaacatgacggtttcctgtgtctggacactggcgcctagtcggcccgcgctttccgtgccatgacatccgtctccttgccctatgcctcgatgggcagcccgtgagcgcgccactcggccacgccatcagtcaggtggaaggcgcgatagcccttcttgcgcaggaactcgacagcgtccttggccatcaggcagaaggggccgcggcagtacgcgacaacgggcatgtctttgggcagctcggcaagccgcttcctgagttcgtcgagtggcagggagcgagcatgcggcaagtgggccgtggcgaactcctctgctgggcgcacatcgagaaccagcacttctccggccctggccttcttcaagatggcagcacggtcgaatccttcgaggtcgtcgccatgcccgatgattgacgccagggccacctgcaattccactagccgctcctcggccgctgaacgaagcgttacccagaggtcggccacgctggtgctggccaggcggtactggacgtacttcccatccttgcgggtctcgacgagacgagcctggcgcagctccttgagatgagcgctggcgagcttcacgctgatttctgcctgggcggccagaacctcgacggttttctcaccctggcacataagctcgataagctccagacgtttcgggctggctacggctttcccgatgcgcgcgacctgctcgtacaggtggttctttaacgttctcattttttcattctatggaacgttagaatgaatggcaagctctgtgtggaaggagcctctctctgggaggctgtttgacagcggttgccagcggtagcttcatgcctcagtcagaccagcacgtgacgtgtctctagaaagaagcgctgaatctcttgttcaatctccggatcgatcattctgaccggccggtttccgttcgggcaggcaagccttggggtcgttccaaacaagcgacaaatcaacgggcgctccgaatacacgctgcatcccttggtatcaaggtgagggcaactcaggtttgccagcgccgtttcgtgctcggcatcgcttttgacgggaagcctcgacatttcctccgttgaggttgtcacaggaccacaacagtcatgacatccaggggtgcactcaaatgtgggaattcgtgagcgaagaaatctgatcttttgactattcattggtgcggttatcagaaagtcggtcaggagctggccgaggtaggatgcgcgctacattcaacccaactgtgcgccgcgatctagttcaactaacgtgcccccggcggtagtctgaggaattccgacgcctcttgcatagcgctctcggccagctcacgggcttcctcgccgccgccgggcgtcatcaggccggccagtgctgcatagagcaagtggatcaggtccacggcacggtgatactgttcgtcgctcatctctttccctctacgaggccatcgagccgtgtcgtcagctcaggccgggaccttgctgtgggactggccgatggccgcgcctgatcgggccgccgtttcatgtgcctccccgcccagacagatgctgcacaagccagatcattgccgacaccgctgcaccggcccagagcgtcacgatcaccagcgccgcaacgtggctgacggggcggtgggcggatgccgcggccgccgcgcgatgctggcgcattaccgcgaccggaatccaccgtattgccagcaacaagcccagcggcaccaccaccacgtcatccagatagccgagcaccggaatgaaatcgggaaacaggtcaatgggcgacaaggcataggcggcgaccggcaaggccagtgctttcgcataccatggcgtgcggggatcttgcgcggccagccacacggcgtgcacatcttccttgactgcgcgagcccaacgccgggaacgtgcgatcaaatgagccagaagatcccggcgccacaaatgcagacgcacatcgtccagcaccggaaccgcagcgagggcaagcaacagggttgccagcgcaagtgtggcgctgaacccgacgtgcttgaaccccagggcgccaatgacgccgccggcaaagaacaatacgacgagtgtgatgagtacctgcagcttatgccgattggcgagcaccggcggcttgctcgaatcggccctggacaggttccaatagaacagcttgcccagttcgataccgatgtcggtgaccatgccggtcacgtgcgtggtgcggatctcggcattcgacagcttggtgaccatggcattttgcaagcccatgatgaaacagagcaccatgactgttgccggcacgaacaaccattcgtggtgttcgagattgctgcctagcaggccaaaacacaccaacaacaaggcttccagcatgagcggcaatgcgtattcgctatgcagtcgctcgcgccgggcccagttgatcagtaccgctgagcaggcggcgcccgccaggaacgacagcaaggccccaaggccgtccaacatcagccagaaactgccaagcgccaggttgtcggccatggcggacacaacgcccgacatgtgcgaggtgtactgctgcacggccaggaagccgcctgcgttggttgctccggccacaaacgccaggtagcaggccagttgccgattgctgccgggactgcgctccttcccagtcagcttgcgcaagtacaggataggcatggttgcgttggtaaggaggcttgcgcgggggagggcggtgtcaataccggagctgcggtcttgccagcttcgaccaggccgcacgatccgacgcaaggcgctcgccgcgtttcaggcggcgagcggccgcggtcaggcttagcgaatgcgcggtttccaggatgcgcgctcgtgcaatcagcgcgtccagggagggcagcttgtgcgcccccttccaggcaaacagcgtgtagttggaactgtcttcggaaagagaaatcgacatcgactggccgaacgcggtgctgacttcctccaggtaaagcgggatatcgggatcgctttcgagaaaattcgcgaccagcacgccggtatcggccaggcgggcatgacaggcggcatagaagtctgccgtccccagctgcaccggcatgccatcggccagaaacccgtccaccaggatcacgtccggtcgcgcatcctggttcgcaacatagtcggcgccatctgcgcaaaccacctcaagtcgttcgtcgtccggcgggatctggaattgctcgcgcagggcgatgaccgccggattaatttcaattgccacgatcttggtgttgggcagatgccggtagcagtacttggcaagcgaaccgccacccaggccgatcattgagatcctggccgggactgggtgcaacaacaggaatcccatcatcgtccgggtatagcccagcacgagcttgtcgggatccttgcgcgacatgaagctctgggtcgcgagcgcgtcgaaatgcagggacagggcgtgctgggtttccaacaccttgggcgtaccgtcgtggctcgcctcggcaaggaacttcaggtaggcgtcgaacgaggtgcggtcggcatgcatagctcaggattccatcaaagcgccttgggaagcgcctctccccgcaacaatgccgcgatggtgacgacagcggcggcttcgtccgctccgtccgcctggatgcggatgtgcgttcccacccgggcggacaggcgcatgacctccatcacgcgcttggcgtttgcaacccaggggccactggtaagcaggatctcgcactcaaattgattggccgtgaaagccagccgtgcggaattccgcccttgaaatgcattcccggcagttaccgctatcgtcacttctaccactgcgcccctcatcaaaaagttgtgccccctgaagactcgtttgcgcgggaccgcgcgccctgccagcatctactaagacatgccggcgcatcttggagatgtatactattataattccattattatatgatgacattgttagacgcatggaatccaagactgcccgcctgaccgtattgatcgatccggagaagaaaaaggcctttgaggcgctctgcgccgcccaggaccagacgccatcccaagtcgttcgccagatgattcgcgactatttgcagcagtacgaggtggactacgccacccggccgacgcttggagcgccaaggtcagtggcgaaggaacgcgggtgatgcaggaaggggccagccggtgcccacgctcaggtgcacacctcaggtgcacaccgctgttgccagggccggatcactagcgtcttgtggcaccggtctgccggacggcgcttagtattgcgcgcaggatctctatcggcggcggtggacagcccggcaccgttatgtctaccgggatgacattggcgacgcggccgcagctcgcatagctctccccgaagatcccgccagtacagccacagtcgcctatcgccaccaccagtttcggctccggggttgccgcataggtgcgcagcagggcctcttccatatgacgcgaaacgggtcccgtcaccaggagcatgtcggcatggcgcgggcttgcgacgaacttgatgcccaggccttcgatgttgtagtaaggattgccgagtgcgtggatttccagttcgcagccattgcaggagcctgcgtcgacctgccggatcgtcagcgcctgcccgagaatgtcgagcagctcccggtggatgcgctggatggaggcggcctcgtccgccgcgccgcgcggagcaggctcagtaacgatgccggtatgtgcgatctgcctgaggattttccacatcagagatcgtgccccgaatagctgaggttgaaggatttgttgatcagcggaaagtccggcacgatgttcccgatgatggcatgctccagcaccggccagttctgccacgacgggtcgtggcaatggcagcgcagaatgcggctgtcatcggcaaggtcgagcgcgaccaggacttcgccacgccagccctccacccatccgaccccgatggcggcgccggcgggcgcttgcggaacgattcgcgtggcaccctccggcaggcctgcacagatggcacggatcagtcgcagcgactccagcacctcatcgaagcgcaccgccacccgggcggcgacatcgccgccgcggtgcgtggccatcttcacggcgacgctatcgtagggccgccaggcatggtcgcagcgcaggtccgcggcgcaaccgctggcacgtccggccaggccggtaagcccaagccgggcggcaagctgcggcgtgacgcagcctgctccaagaaatcggtcctgcaggcccgcatgttcgtcgtacaccgcacgcagcacgcgtacttcccgctcgatgtgaccgcactgctgttccaggcgctcagccatggctggtgccaggtcttgcgcaacgccgcccggtaccacggcgtccatcatcagccggtgaccgaaagcctctgcggacaaccgctgccagtcttcgcgcaggcgcgagaattgcgccaggccgaaggccagccccgcgtcattgcccagcgcccccaggtcacccaggtgattggccacccgctcacgctcgagcatcagggcgcgcagccagtccgcccgcggtggaggcgcgcagcgccaggcggactccagcgccatgcaataggcccaggcataggccacggtggaatcgcccgagacccggccggccaaccggtagccctcgggcggcgccagttcggtgaaacgccgctcgatgcccttgtgggtgtagcccaggtgttcctccagccgcagcaccttctcgccgaccaccgaaaagcggaagtggccgggttcgatgatgccggcatgcaccggcccgaccgcgatctcgtgcacgccgtcgccctccacgcgcacgaaaggatagttggcaggcaatatgccgccggtggccgcacccgccggcgcgccgccttgcagcggccgcgcccctgccggccacaggccgtggtccagccagggccggccatcgcggctgtcctgcacggggatacccaccaggtcggtcatggcacgttgcatccggcccgcgcatgggaatacgccggccaggtccggcacggcgggcgcgacgccatccagtcgcagttcgagccacatcagcccccgcgccgcggcgtatgtgacgcatgccgtcaacgtgccgccgatggcactccgatcaacgccccacagcgcaacgaggcgcccgccagcgtccgccaccgcgcgggccgtgaccgaccagccgtctggatcgacccggccatgccagactggcagcggcgcgggcaaccgctccaggttgaggccgggatcggacagagtcatcggttcagctcccaagcattgcggctgcctgccggtaccaggtgtcgagatagggcggaacatagaggcccagcatcagccccagggcgaggtgcgtgaacaccgggaccagcgctggcggatgcgccagcggcatgagcgtggtgtcgccgaagaccatcggctgcacccggctgaacaccgcggcgaacgccagcccaagtgccaacagcaggaagggcgtggcccacggctgttcgcgcatggcggtggtgacgatcaggaactcgctggcaaagaccccgaacgggggcatgcccaggatggcgagcactcctaccatcaggccccagccgaccgtgggactgacacggatcaacccgcgaatatcgtccatgacttgcgtgcccgccttctgcgcggcgtggccgacggcgaagaagatcgctgacttgaccagcgaatgcaccgtcatgtgcagcaggccggcatagctggcgatcggcccgcccatgccgaaggcgaaggtcatcatgcccatgtgctcgatggacgaatacgcgaacatgcgcttgatgtcgcgttgccggatcaggaagaagacagccgcgaccaccgatagcaggccgaaccccatcatcaggcggccggtcagatggttgccaagcgccgcatcggtcagcaccttgcagcgcagcacggcatagagcgccacattgagcagcaggccggagagcacggcggataccggggttggcccctcggcgtgggcatcgggcagccagttgtgcagtgggaccaggccgaccttggtgccatagccgataaacaggaaggcaaacgccagcgtgatgatgttgggatcgagctggcgcttgaccgcgtccaggttggtccacagcagggccccgccctccgggccgatgacctgctcggcggccatgtacagcagcaccgtaccgaacagcgcctgggcaatccccaccccgcacaggatgaagtacttccaggcggcctcgaggctcgcggcggtgcggtagacgctgaccagcagcaccgtggtcagcgtggcggcctccatcgcaacccacacgatacccatattgttggtcgtcagcgccagcagcatggtgaaggtgaagagctggtacatgctgtggtacagacgcagccgcggcggcgtcatcttgccgtggtcgtgctccacccgcatgtacggccgcgaaaaaatcgaggtggtcagccccacgaacgcggtcagcgcaaccaggaagacgttcagggcatcgatgtagaactcccggtcccatgccagcatgggaccatcggcgacgatttgcgccgtcagcacgcaggcggcgaggaatgtgcccaggctgaaggcgacattgatgtcgcgggcgcgctcgcgatgtcccgtcagcgccagcaccagcccgccggcaagcggaaatccaagcagaaaggccagcgcggtcaactcaatcctccttcagcttctcaaggtgacggatgtccaggctgtcgaactgctcgcggatctggaacatgaacacgcccaggatcagcacgccgatcagcacatccagcgcgatgcccagctcgaccaccatcggcatgccataggtcgcggcggtggccgcaaagaagaggccgttctccatcgccaggaagccgatgacctgcggcaccgccttggagcgcgtgatcatcatcaggaaggacagcagcacgcaggccagcgcaatgcccagcgtgccgctggcgagcttcagcgacagccgcgagatcggcatggtgaggttgaaggcgaagatcacgaccaggatgccgatcagcatcgtggtgggaatgttgatcagcgtctcgacgtccctgcggatccggagacgatcgatcacgcggtgcagcagataagggatgagcaacgccttgaggatcgcggtcaggccggccgacaggtagaggtgcggctggcccgtcacgtagccgacgatagccgtggccaaggccagggtcgcaccctgcagcgtgaacaagttgatcagcgacaggatccgtcgttgcgagatcatggcgaaggcgaggatcaacagcaccgcgccgagcaggttgacaaactgggtgaggagtacggtcactggactggcctccgggggttcagcgtgccagcagcaagtggaccagcatgccgatcaccgccagcagaaaggcggtggccaggaactccggcacgcggaagatgcgcatcttggcgctcgccgtctccagcgccgccagcaggatcccgcccaccatgagcttgaacagcagcgcgggcagcgccagcagcatggccaggggagcttgcgcttctgcaacgccccatgggaaaaacagcgccaggccgatgcaggaataggcgaacagcttcaggcttgccgcccactcaaggagggccagatgccgccccgaatattccaggatcagcgcctcgtggatcatcgtcagctcgaggtgggtggcgggattgtcgaccggtatgcgggcgttctcggccagggagaccatggtgaacgccacgccggcaaacgccaggccgggatagatggccaggtcccggtgagcaatcgtctcgacgatggtggtgagcgaggtcgacttggagaccagcgaggcggagaacagcaccatcagcagcgccggttccgccaggaagccgatcagcatctcgcgccgcgctcccagggtcccgaaagcggtgccgacgtccatcgccgccagcgagatgaaaacccgcgccagcgcgaacaggccgaccagggcaatcgcgtcggcggccggtgccagtggcagatcggtggacacggtcgggacgatcgagcaagccagcgccatgcagccgaacaccacgtaaggcgtggcgcggaacagcggcgaggcattgtccgcgaccaccgagtccttgttgaacagcttgtgcagcatgcgatagggctgccagaggctgggtgccgacttgttctgcagccaggcccgccactgattgacccagccggtcagcagcggcgccagcgcgatcgaaatcacgatctcaagcagctgtgacaggatcccggtcaggttcatgcggccctcttcacatcacggccagcagcgtggcggccagggtcaggaagctgtacagcaggtaaaccgagatgcgtccctgttgcatcaggccgatcagccgggccaggtacgacgccagatcgatcacggggacatacatccagcgccaaaaatgatccgccactgtgacccggtagtgcggctgctcatcgaatggcgtcggcaggtcgcggcgcatcaggaaaaacggctcaaagatctggcggatcggctgcccgaacccctcggcagtgtcctgcatgcgcgcggtgccccagggaaagccgcaagcccagggcgggctgcggcgaagccgaccgtggtacaagcggcgcaccagcaggtaggcgagcgcaacgctggccaggatgcctgacaggaaaataaccggcccgtagctggcctgggccaggccattcggcgccagcagccagctgctggccgcggtccgggcgccgagtccgctcgccaccagttgctgcgtcaccggatcgatcaactggacgaattgcgtcggcagcaggccaagcgcgatgcagcccagcgccagccacagcatgcccgcgcgctcccaacggccggcgtcgtgcgcgttgaccagtctgggctcacggggctggccgaggaagatcacgccgaagaacttgaccatggtgtaaccggccagtgccgccaccagcgcaatcagcgcggcgaccaccgggatcagcatggtcagtatcggttccggcagaccaggcgtgaacaggaagctctgcagcagcagccactccgagacgaaaccgccaagcggcggcagcccggcgctggccagcacgcccagcagtgtcagccagcccacccatggcatgtagcgaatcagtccgcctagcttgcccaggcttctctcggtggtggcatgcagcacgctaccggttcccagaaaaagcaggcttttgaagaatgcatggctggcgacatggtagagcgcggccgtcagggcgagggcggccatcggcttcatgccgtaggccgagaacagcagtgtcagccccatggcaacgaagagcaggcccatgttctcgatcgacgaataagccagcagccgcttcatgtcggtctgaacagctgcgaagaccacgccgaacagcgcggtggccaatccaatcgccagcagcaatccgccccaccaccacaggcgcatcggcagcaggtcgaaagatacgcgcaacaggccgtagatggcagtgttgagcatgacgccgctcatcattgccgataccggtgacggcgcggccggatgcgcctccggcagccagatgtgcagaggcaggatgccggccttggcgccgaatccgaacaacgcgagcaggaaaccggcggaggcccagaacggcgtcagcgcctgggcgcgcatgttggcaaacgtatagtcgccggtattggcctgcagcacgccaaagcacagcagaatcgcaatcgccccgatgcgcgccatcgtgatgtagagatagccggcggcgcgcacttcggcgatgcggtggttggcggtcaccaggaagaatgaagccagcgccatggtttcccacatcaccatgaacgagtaggcgtcgtcggccaggatcaccccggccatgctggcaagaaacaggtggtattcaagacaaagcaggcctggcggcgtaccttcgcccgtgcggaagtagccagccgcaaacgtggagatgccagccgccgctccccccattaccatcaggaagtaggcggacaggctgtcgagccggacgtggaacggcagcgatggcaggccaatgggcagcacggctgcctcgggcgtgccggacacagcgtgcagcgccaggctgaacagcgcaagccctagcagtcccccgatggggaacagcacgtgggataccagggcaaaccgatgcagcgccaggacccctgccacgccgataagcagccaggccccaaccacaacaagcatccagtcgagatggagccattgcgtgagagggggcacggtgctcatggatcaggctccacgacgggtcgtacggcgcttggcaggaggtgccgcgtcgcgccgcgacgacgcgccgaccggtggcctctctttgcccttggcttccgccttgtccgtgcctacgccgctgggcacgtactggacgccatgctgggccaggtagtcgcggataagccgccgtatcacctgcgaggcagtcagatcctgttgtgcgcagaggcgctcgaaggcggccttcttgttgggatcgatgagcaacgtaagccgagcggtcttttgctccatgggatcctcaagatggcaatacgatgattacatgaatcacatcatagatgatggccatgcgaatcaaaaggcctggacgctgccattcctttactcgctgcaaccagggcaaatacactggacggcgtcgcacattcgtcgctggcgtttcctgctgtcagcctagtgcatgcggcgctgcagcatcccgctgtcgccggtgcgcaattctcccaatgcggtcagcgccatcgagtttctcgttccgcgtgtgctaggctgaaggcgaaatcctgccgcccacgcggagacaccaatggtcgaagcttccgaactgaagtcgggcatggtcatcatgcttgaaggtgaacttcatagcgttaccagcgccgggtaccacgccggcggcggccaacaggggagcgcagttttcgccaagttcaagagccttaagactggccacatcaaggagttgcggttacacccgggcaacaagctcgaagaggtcgcgcttgatcaccaggagatggaatatctgtacaccgatggtgacgcctttttcttcatgaatcccgacaccttcgagcagatcagttttcctgcggaaaccatgggcgcataccagaagtttcttcgtcccaatatgcgaatcccggtgcagctttatgagggcgagccagtcaccatcgcattcccccctgcggtcgaggtaaccatcatgtccacgccgccgggcctgcacgagcatgaatcctctaccttcaaggctgccacgctggagaacggcatggaagttctcgttcctcagttcgtcaaggaaggggacacggtgcgaatcgaggtcgcttcaggaaaatatttggagcggataaggcgagggacgcgaaaggcgtgactccggtgccgcgcgactccctgcatgcgcagcgccgcgtacagttccggcgggacgggggcggcagcgtcggcagtaccgcattcggcacctgatagccatcagcgacaaaaggcttggcgcgtaagcgcggcgatgcttccgtcgccttggttctacggtcctcttgcctccttccggacggcttcgtcgtagcgtgttctttgtcatgccgggctgtcagcccagtcctatatttgacacagtgccaatcgtgctgcgcgacgcaccgcgatgatttcgctaacaggagggcaagatgaacgacatccaatctgatttctctatgcgcaaggacgcattggcccgcgacgtcgatacgctgatggccgacgttcaggcacttcttcatgatgtcaaagccgaaaccggcgtagggaccagccttgagcgccatgcactcaaggcccggcagcgcgcgctgcaggagcgcatcgttacgctgcgcgaagaaagccgcgccaaagtctccgagtgggcgacaacgaccgatcgctacgttcatgagcatccgtggcaaagcatgggtactgtggccgccatcgcggctaccacaggcgctatcgtcgcgctggctgccagccaccgttaggtattcgtgactgagggacctgcacggcagtgacccgtgctggtcccgcaaggggcacgtgttttttgccatgccggcaaatggctacagccccttgcgggagcctcgatctaagtggcgacacatctgagcggcaatacaacaactgtgcccgccaggtgcgattgcccagacgcgccacgctggacggtctgcttacgtgcgacccgcaggatgtttacccaggaggccagtcatggacgggctgacaaaggaagagttggcgaagttggtggcccaaatggacgctgaggagttgcgcattcgtgccgtcgccggaaccgcggattcgcctgttgtggcgccaacacaacgtgaacaccttgatgatggtgaagtggcggacgaaaagactgtgcagcgccagggcgacgcgatgctgaaacactatcgcatgcaactggctgacattgaagcagcccggtcacggatgaggagcggccagtatggcgtctgtattgactgccagcaggcgatccgtttcgcccgcctgcaagcgtacccgaccgccacgcgctgcacggcatgccagaatctccacgaacaccgccatccccgccaggcgcaggagacgcgccgaccggcttccacagatctttcgtcgccggactgacttactcgttcctgagatcaatgccgaagccgcccgccagttcacaatcgatgatcccggcggcgtaggcgaaaagccattcctctgcctcctccagcgttgcgggcgggtggggccagtccggcgtaaagcggatgcccatgtcctcattgcgcgtggagatctgaactcgcccgcctggcttgcctggctcaatcacctccggcacgaagagcgcaacgtggaatcccttgtaagaccgctttttttccagcatttcagcctccggcaatttacgatgtccgtagctcagcccgagcgccggactgtcttgaattcaagatatagcgaggcgcggctaatgcctagtaatgccgcggaaccccggcgatcacatcggagcgtgcggttgaatttgacctagactgaaaaagtgccttcgcgcgcttcgaggctgggcaatggagcttcattggcagccaactgatgcgggcgaatgacaatggcacaggcaacacacaatcatctgctgcctgaactcatgtgaattggtgttcacgaagggggcatcatgttgcaagccagtgaaatgcagcaacgttttagtcatctgcagcaaaccatcagcgagacatcccggacttgtcatgccgatacggggattccacaagacttgatgaactgggtggatgagctcgacaaggagtgcaaatcggcatcgaaggtcgtgtcttccaaggatgaggatcggatccggcagtgggtcgatgatctcgaacggatcggtgatcgtgcagaccgcgcttgccagcaggccggcagtctcgatgcaaaggtcaaggatgcagtcagttcgatgcattcggaacttgctgacctgaagcgccaactgcactaacttatctgacagccccggtccaaccagccggggctgattgcatgcgccgcggtcaaggcgcgcacgatctcagtccgcaggcaaggccaggttgcacctgcaccccgcctgcataggcggcctccctcagccctgcagggcacccaaaatcacctcctgcacacgcgctttccaggcggatcagcgcgctggagaaggccattggcctgcggctgctgcatcgcacgatgcgcaaggtcgagctgaccgaggccgggcagctctactacgagcgctgcaagcgcatctggacgaagcacggatcgcccacgagcaaccgggggagatgctgccgcctggcaatgctgggcctgggcgtggtcttgctggccgaggaggtggcggcagaggacgtggcggccggccgcctgcgccggatattgcctggcaggcagaccaggccgacgccggtctatgcgctgaccgaaacacgcttgctgccggcaaagacacagcgctttatcgagttcctgaaggagcgtctgggcaccaaagcgtgagcacacagtgattgcgcgccgaacgcgcaatcacctccagcgacggtagccctcacttgcgccgcatttgcatgaccgtaggcttgccatcaacgttgtcgaacgtcacggataccgcctcgccctccttgaaatccttcagcgatgcgcgatccttgacggggaacgccatggtcatcggtcccatgccgaggttggcgatcggtccgtgcctgagcgtgaccttgccggcctgcgcatcgatcttcttgatctcggctgccacgggttgcggcgcctgctgcgcgggtgcggacggcttcatgtccatgccgtccatcgatcccgctgcgaatgcggccggcgtggtggcgaaagccagcgcgagggcgagcgtcttgatggaattcatagtggttccttctgaagtgaggggtgtacggaaactggttgaggtctggtctggcgccggcgcatcagcaaatacaccgccggcaccacgaagagcgaaagcaatggcgcggtgagcatgccgcccaccatcggcgcggcaatgcgctgcatgacctcggagccggtgccatgcgaccacatgatcggcaccaggccggcaaggatgacggcgacggtcattgccttggggcgcacgcgcagcaccgcgccttcctggatggcctcaagcagcgcggacaggctggcatcgccctggttcgcgcgcgcggtccatgcctgcttcaggtagagcagcatgatcacgccgaattccgccgccacgcccgccagcgcgatgaagccgaccacgccggcaaccgacaggttgtagcccagcaggtagagcagccagaagccgccgatcagcgccagcggcagcgtgcccatgatgagcagggcttcatcgagacggccgaacaccaggtacagcagcacgaagatgatcagcagcgtgaacggcactaccaccttcagctttgcggcggcccgctccaggtattcgaactgccccgaccagctcagcgaatagccagccggcatcggcaccgctttcgcaacggcggcctgcatatcccggacggccgagcgcaggtcacgcccgcggatgtcgacatacacccagcccgacagtcgcgcattttcgctgcgcagcatcggcgctccctgcaccacctggatgcgcgccaggtcggacagcacgatctgctggcccttgtccgtgacgatgggcaggctgcgcagttgctccaccgagtcgcggtagtcgcgcgggtagcgtacgttgatagggaagcgcgccagcccgtcgacgacctcgcccacattgtcgccgccgatggccgacgataccacgctctgcacatccgcgatgttcagcccgtagcggcccgccgccacgcgattgatgtcgatatcgacatagcgcccgccgctcagccgctcggccagtgccgacgtcacccccggcactgtcctgacggcttcctcgatgcgcgttgccaggcgatcgatctccttcaggtccgcgcccgccaccttgatgccgaccgggctcttgatgccggtggcaagcatgtcgatgcggttgcggatcggcggcacccagatgttggacaggcccggcaccttgaccacgcgatcgagctcttccaccagcttgtcggtggtcatgccggcacgccactggtcgcgcggcttgaactggatggtggtctcgaacatctcgaggggcgccggatcggtcgcggtatcggcgcggccggccttgccgaatacggtcgccacctcgggcacggtcctgatcaggcggtcggtctgttgcagcagctgcgccgccttgccggcggaaaggcctggcaatgccgacggcatatagagcaggtcgccctcgtcgagcggcggcatgaattcggcgccggtacgcagcatcggccacgccgtcgcggccagcagcaccgcggcgaccgcaagggtggtcttcgggtaggccagcacccgtgccagcaccggccgataggcgcggatcagccatcggttcaaggggttggactgctccgaaggaatcctgccgcggatcatgtagcccatcagcaccggcaccagcgtcaccgacaggcccgccgccgcggccatggaataggtcttggtaaaggccagcggcgagaacagccggccctcctgcgcctccagcgtaaagaccgggataaacgacagcgtgatgatcagcagcgagaagaacagcgcgggcccgacctcggtggcggcccggccgatcacgccccagcgctcgttccctgccagctcccggccggggttctcggcatgccagtgttccagctgcttgtgcgcgttctcgatcatcacgaccgcggcatcgaccatggcgccaatggcaatggcaatgccgcccagcgacatgatgttggcattgatgccctggtagcgcatcaccaaaaaggcggccagcacgcccagcggcagcgacacgatcgccaccagcgcggaacgcaggtggaacaggaacagcaggcacaccagcgcgaccacggcgaactcttcggccagcttgtgtgtcaggttttccaccgcgcgcttgatcagcgcggagcggtcgtaggtggtgacgatctgcacaccggcaggcaggctcttctgcagcgtggctagcttcgccttgaccgcctcgatggtttccagcgcgttcttgcctgagcgcatcacgatcacgccgccggcaacctcgccctggccgtcaagttcggcgatgccgcgccgcatctccgggccgagctggacgatggcgacatcgcccagccgcacaggaatgccggcatcgctggtcaccagcggaatctgccggaaatcgtcgagcgtcttcaggtagccgctggcgcgcaccatatactctgcctcgcccatttccagcaccgacccgccggcctcctggttggcgcccctgagcgccgccagcaccttgccctgcgacaggttgtaggcgcgcatccggtccggcagcagcaccacctggtactgcttcaccatgccgcccagcgaagcgacctcggccacattgggcagcgatttcagttcgaagcgcaggaaccagtcctgcattgcgcgcaactggccgaggtcatgctggccggtcttgtccaccagcgcgtactcgtagatccagccgacgccggtggcatccggccccagcgccggcctggccgcggcaggcaggcgggactgcacctggttcaggtattccagcacgcgcgagcgcgcccagtacaggtcggtgccatcctcgaacagcacatagacgaacgaatcgccaaagaaagagtaaccccggaccgtcctggcgccgggcaccgacagcatggtggtggtcagcggatacgtaacctggttctcgacgatctgcggcgcctggcccgggaagggcgtgcggatgatcacttgcacatcggacaggtcggggagggcgtcgagcggcgtgcttcgcaccgcccacaggccccatgcggtcagcatcaccgtggccagcaggaccaggatgcggtggcggatcgaggccaggatcaggcgcgcgatcatggccgggctccctgggcggtgccggcgggctcgaccgacgacagcatggccgcgccgtcgcggtccaggtggaagcggaagcggatgcggtcgccaggcttcagtcccttgggcaggcctgtcggcggcgcggcgaaatccatggtcatcgcaccccactgtgccgacgggatggggccatgcgagatggtcaggctctcgctgccgttcacggcttcgatgcggcctgtgccttcatgctcggccgatggtgcggcaggtgcggaggccgcaagcggggcggacatgcgttgcgcgctgccgcgcaggctggcttccgagtcgatcaggaactggccggacgtgaccactttctgtcccggcgccagtccgtccagcacctcgaccatgccatcggcttcgcggccggtcttgatctcagtggcaacgaaccctgcctggccggcatcgaccatgacgatactgcgctggccggtgcggatgaccgactccgacgggatcagcaacgcttccttctgcgcgccactgtcgaagccgaccgtgacaaacatgcccggcagcaggcgcctgccggggttgggcaggatgatgcgggccttgacggtgcgggtcgccgggttgacgtcgggaaggatggcgtcgaccttgccggcaagggggctggccgtgccgccctgcagtaccgtggccgccgcgccgggccggatggtgccggcctggccctctggtacctcggcaatcacccacacctggctcaggtcagccaggcggaacagcgtcatgcccggcgacacggtcatgccctcgcgcaccgccacctcggtcacgaggccatcgaccgggctggcgatggcaacaccgggctgcggcttgccggatctttcgaccgcactgacctggcccggcgtcatgcctgcctgcagcatgcgattcctggcagcactgcgcaggtcgtccagatgctcgctcgctgccatgcgtgacacggccaggtattcctcttgcgccgcgacccagtcgggcgagtacagggtgaccagcgcctgtccgcgccggaccgggtcaagggtggcccggaccgcgacgtgctgcacaaaggcgttggtgcgcgcctggatgacctgcacgctgcgttcgtcgatggcgacattgccgggcacctgtagcatcgcggccagccgtccaggctttgcctcggtggtgcgaatgccgaggttttgcgcgacatggctgtcgacggtgacaccgctgccgctgccatcgccgtccgcgtagaccggcaccagttgcatctccatgaagggagatttgcccggcttgtcgaagcgctggcccggcaccatgggatcgtgccagtacaggatcttcctgccggtcttcggatcgatgtcgccggccttgagcacggtggattgcgcgccagccgtgctcgacggttgcgcagtctgtgtgccgcgcgtgaacccgaagtggtaagcgccgtagagggcgatgccggcgacgaccagcccggctgctgctgcaatgatgtgcttcttcattttgcctccctcactgcggcttcggcctgggcggtaggcaatggcaccaggtagttcaggtccgcccacagcttcgcggtctttgcctcaagcagcaggcgatccatggcggtgtcgatggcgcgatggttggcttcggcgaccgccgccaaggtgcccgtgctggcgcggtaggccgtcagtgccgcatccgcctgtgcccgcgcgagcggcaaggtcttgtcgtcgtagcgccgcagccggtcaaggttgcgctgcagctcggccagcctggcgccgaccatggcctgggtattgcgccggaccatttccagcctggcccgcgcgtcattggcctgcgccagccgcgcactgatttcgcggtcctggcggttgccccggtcccacggcaatgggaagctgacattgagcgagcccatgttcgagtaggccgagccgcgctggctgtacatcagctcgaccgtcacgtccggcttgcgggcttccgttgccacctggatctccgattcggccagcgccacgtcgcgctgcgcagccgacagttcgggcacggcctcgaactcgcccctggcgagttgccgggcgcccggcggcacttcaagcggtggccgcgccgacagcgggcgccgcgcagcggcgccgacccagcgctccaggttcagcgtggccgttgccagcgcggcgcggttctcgtcctcgcggtcgtgcagcttctggatttccagctccatcgccagtacctccgcacgcgagccgcgcccgccgcggtaggccgcggtggcggcctgcagcgccagttcaagcggatggccgtgatggccgagcagcacgccggcctgctccgcataccaccggtcgagccaggcattgaccgcattgcgctgcacgcctgccagccccactgtgcgctgcgcgtcggcagcggcggcttcggcttcgaagcgcgcggccctggcgcggcgcttgtccgcgcgcgtgaattcctgcatcaccgagatcgagcgcatggtcatggaatcccggctcagcgagaacgcgtccgagccgttgaccggcacgttgttgacgccgagcttgagcacgggatccggcaggcggccggcggcgacggccatttgcccggcggcctccacggcgccgcgcgacgattcggcgtcgccggcatgggcgctcgcgatcgcgacggcttcctcaagggagagggaaggggcggattgcccgggcgcgccttgcggcgcagccaggccgattgcgggcgcgctgagcagcgccacggacaggtgacgtagaaaaagcataaagcctccagggacgacgactgctgcccgcatggaagcaggcagcaccaggtgacgtcgagccggaggctaagtctggaaactgcagtgaaggacggtgaggggaggcggtgcgcgcgcctctgcctcggcgcgcagcccaacgcgaacctccgccaggaccacgcgcgttggctcaagcacgcgcatcagcaccggcatgaaggccggaagctgcggcgaagcatggtcggcgttcctggaatcggcctggcaatgcgccaggcaaagcccgctctggtcgatgtcctgctgggtgtcgctggcggccatatcggcgcaggattcggtcatcgccgccatcgtgccgctgtgttccgcctggtagcggctgccggtacaggcgtacgccgccactgccagctgggctgccaggaagacaacgaggaggaagccggcgaaccatggccggcgatgcgatttgctcacgagagcggtgcctgttttggcgacaatatatcagtgttcggcgccaccaggcagcatcgctactgcggcagcttgccgcacaggtgggccgttcgcgaacatagcgaacggcctgatgctgcactttcgcatgttttcctgcagcggcaacgatgccgtcctgtgacacgtcacggtgccgaaatattcgtcgtgcatcctcccgccaaaaccaacggggaggaaatatgaggcgtctttcaatactggcagccccgctgctggcgctggccgtagcgtcgtgcggcagcgatgatgacaacaatgcgccggtcacgcagccgccggctgccggcagcaccgcgccggcgaagaacgtcgtgttcttccttggcgacggcatgggcatgacgaccatgaccgcggcgcggatctacaaggtcggcgaggatggggacctgaccatggatacgctccccgagagcgggtttatccggacctattcgaacaacgcgcaggtgaccgacagtgcgccgtcgatggcggcctacatgactggcgtcaagatgaacaacgaagtcatctcgatgacgccggagaccaatgccttcgacgccagcggcaaggactacctgtccggcgcggacagcacctgcccggcttccggcaacggccagagcgtgccgacgctgctcgagcagatgaaggcggcaggctacggcaccggcgtggtcaccaccacccgcatcacgcacgcaacccccgccacgacctacgcgcacgtgtgccaccgcgacgccgagaacaccatcgccgcgcaactggtgccgcacggcgctggctacaacagcgcgcttggtgatggcgtcgatgtgatcttcggcggcggccgcaagcacttccagaacaaggccgcgggcggcgcccgcaccgacggccgcgacctggtcggcgagctgaccaaggccggctatgcctacgtttccagcaaggccgagttcgacaagatcgacgccgccagcgcgaagaaggtggcagggttgttcacgtccagccatatggcctacgacctggaccgcgtgcccggcgatgaaccgagcctggcggagatgaccggcaaggccatcgacgtgcttgccgcgaagaggaagggcttcttcctgatggtggaaggcggccgcatcgaccacgcattgcatgaaaccaccgcgcgcaaggcgctgcaggacaccgtggccttcgacaccgcgatcaagaccgcgatcgacaagctcaacgtgatcgacccgggcctgaagaacacgctgatcgtcgtcaccgccgaccatgaccacacgctggtgctgaacggctacgccaagcgcaccggccccaccagcgacagcaaccccggcgtgctgggcctgctgaagaactacgtgaccggcgccctgtccacggactccggcggcaatcctttcaccattatcggcttcggcaccggcgagaaccgcccggccacgcgcaccgcgctgaccgatgcacaggtctacgacaagagctatcaccaggaagccgcgatcccgacggcggcgggtggcgagacccatggcggcaccgatgtctttatcggcgcactgggcaacggtgccgaatccttcgccggtgtgatggacaacaccgacgtgttcggcctgatcaagacggccatcggcctctaagccactatcgctgacggaataacgccatgaaactcatcattcgtaccggcctgtccgcacttgcggctgcctgcgcctgcattgctctccctgcgcaagccgcgggcgaggccaagaatgtcatcttcttcctgggcgacggcatgggcccgaccaccgtcaccgcttcgcgcatctacaagtatggcgagaccggcaagctcaacatggagtcgctcaagcgcaccgcgcgcgtgaagacgtattcgaacgacgcgcagaccaccgacagcgcaccgtcgatggcggcctacatgaccggcgtgaagatgaacaacgaggtcatctcgatgtcggccgataccaaggccagcgacggcaccggcaaggcctatgtgaccagcgccggcgacagcacctgtcccagcggcaacggcgcgccggtcgtgaccgtgctggaactggccaaggccgccggcaagtcggtcggcgcggtgaccaccacgcgcgtgacccacgcaacgccggcggccactttctcgcacgtctgccaccgcgacggcgagaacaatatcgccgcgcaggcaacgcccggcaacgccggctacaacaccgcgctcaaggatggcctggacgtgctgcttggcggcggccgccgccagttcctgcccgacagcgtcacgggtggcaagcgcaccgatggcgtcgacctgaccacgcagttcccgggctacacctacgtgaccaccggcaccgcgttcaaggccgttgacccggcatccaccagcaagctgctcggcctgttcaacatggaccacctcaactacgagctggaccgcgtcaagaacaatgtcgacgagcccagcctggccgacatgaccgagaaggccatccgcatcctgcagaagaacggcaacggctatttcctgatggtggagggcggccggatcgaccatgcgctgcatggcaccaacgccaagcgcgcgctggaagacacgatcgcgtttgacgatgccatcaagcgtgcgctgtcgatggtggacctgtcgaacacgatgatcgtggtcactgccgaccacgaccatacgatgacgatcaacggctactcgcatcgcggcaacccgatcctgggcacggcaacggacatcaagaccaggcagccggccacggcggccgacggcctgccttacaccacgctggtgttcggcaacggcggcggtccgcgcaagaccccgcgcgacaaccccgcgctggtggacaccacggccgacggctatctgcaggaagttggcgtcaaccttggctcgccgggctcggaaacccacggcggcggcgatgtgatgctgttctcgacggggccgggcaacgccgcgctcaagggcaccatcgacaacaccaaggtgttcagcgtcgtaaagtccgcgctgggcctgtgatgccggccgcggccttgctgcacgactgagcacagggtcttttgatgccatgcgcgcgccggttgccggcgtgcgcattttcgctttctgaacggatttcatgaaaaccaagcaagccactcccgtcctcgcactgctgctggtctcggcagccttcactgccgtggcggcggaaccgtccaaggcctccggcccgctggcgctgcgcgtgcagcatgagttgtcggcgctcggggccgacggcgtgcgccgcgacatctacttcaccgaacgtgtctaccgcgagggcggcacggtctggatcgagcgcgagatcccgcacggggcgcacgacgaagccgagcacgccaaggcagacaagggccacaagcacatggacatgtcggccgccgcgcgctggatcgagcggcagccgtccggcaagctgtcggtgcggctggtcagcgacgccatgcgcaagaccttcgaagtcagcccggccgaatacggcaacatcggcttcgacggctcatgggcgaccgcctaccacctgctggatccggcagcgctcaagaccatgagcgcgagcggtcctgcacgcggcggtgtgcaggagtaccgcgcgaagcgcggcgatgaacaggtgacggtccagtgggacgtggccggccaatatccgcgcctggtccagtcgcgcaatgccagcggcacgcaaaagaagatcacgcgggtgaccgccgctgccttgccgcaacccgctccgtggaaccgcacccggccctatgcgaaaggtgagtacacggatctgatggactagtccgcggctatcgcaggcgcggttgtcctctggacaactcggacgacgggcagggtgccagcggcgcttcaccggatcaggcattgcatcaatcctatatttctagtattgtagaaatatggaagaatatgatgttgtccgctcccttgcagccttggcccacgggctgcgcctccaggtcttccggatgctggtcgtcgccggcccgggtggcatgacgcccggcgcgatggccgagcggctggacgtgcctgcggccaccctgtcgttccacctgaaggaactggcacacgccggcctggtgacgcaggagcgggacggacgcaacctgatctaccgcgccgctttcgcgcatatgagtgcgttgctcggctacctgaccgccaattgctgcgaaggtgtcgaggacaaagcggcggttccctgccactgctgatggagatgttccgatgaagcgctttcacgttcacgtccatgtcgacgaccttggcaagagcattgccttctattcgaagctctttgccgctgaaccgacgcgagtcgagagcgactacgccaaatggatgctcgaggatccgcgcatcaacttcgcgatctccacgcgcggccaggggacgggcgtcgaccatctcggtttccagaccgatgacgccgccgagcttgctgaactgaaagcgcgcgccgaggcggccgacatggcgctgctggaccagggtgaaaccacttgctgctatgcccgcagtgagaagcactgggtcaccgatccgcagggcattgcatgggagcacttccatacgctgggcaacgtcccggtatttggtgaaggcaaggctgaagcggcgtccgccgaaggctccgcctgctgtgcaccgcgtgccccgcgcggcaagccgatcggaattgcagtgaactccaactcgtcgtgctgctaaggactcgccatgagcgccagcgtctacaacgttctcttcgtctgcaacggcaattcggcccgttcgatcctggccgagggactgatgaaccatcttggccaaggccgcttccgcggctattcggcaggcagccacccgactggcgtggtgaacccgttcgcgctggaagcgctggaaaagctgggtcttccgaccggcgggttccgcagcaagagctgggacgaattcgcgcgagatggcgccccggcgctccacttcgtgttcacggtgtgcgacaaggccgccggtgaactctgcccggtctggccgggccagccgatgaccgcgcattggggcgtggcggatcctgcagccggtgaagtatcggacgagcgcaggcaaaagctggtccgcgaagcggcggtaatcctcacgcgacgcatcgagtacctgctcgcactccccatcgataaactggatgccgtaggcctgcaacaggccgtacgggacatcggccaacgctgactctttactgtccatgactacaaacgttctgatcctgtgcacccacaactctgcccgcagcgtgctgagcgaagggatgctcaaccattgggccagcaagctcggcaaggatgtgcgcgccttcagcgccggcagcgcaccgagcgggcgcctgaacccgttcgcactggaagcgctgaccagtgccggcgtcgacgtgagcggctaccgcagcaaaagctgggacgaattcgtcggcgacaacgcgccggaaatgcggatcgtgatcacggtctgcgacagcgccgcggcggaacagtgcccatattggccgggcagcccggtcaaggtgcactggggctatgccgatccgtccaacgccctgggcggcgacgagggcaagcgcctggcattcgagctgacgcgcgaggccattggctaccgcatgctgcaactgctggcgttgccgctggaaggcatgagcaatgcgcagctgcaggacgcgctcaacgcgatcgcgaagaactgaaggcgccggaactccaatgaatcagaacgcaaccacccacgcccccatttcgaccaagcccgccatcggcttctttgaacgctacctgaccatctgggtggccctgtgcatcgtcgtcgggattgcgctggggcaggcgatgccgggcgcgttccaggcgatcggcagcatggagtacgcccaggtgaacctgccggtcggcatcctcatctggatcatgattatcccgatgctgctgaagatcgacttcggcgcactgggccaggtgaaatcccactggcgcggcatcggtgtgacgctgttcatcaattgggcggtcaagccgttctcgatggcgctgctgggctggctgttcgtgcggcacctgtttgcgcccatgctgcccgccgagcagctcgacagctatatcgccgggctgatcctgctggccgcggcgccgtgcacggcgatggtgttcgtgtggagccagctgtgcaagggcgacccgtatttcacgctgtcgcaggtggcgctgaacgatgccatcatggtggtggcgttcgcgccggtggtggcgctgctgcttggcctgtcgtcgatcacggtgccgtgggatacgctgctgacgtcggtggcgctgtatatcgtggtgccggtggcgatttcgcaggtgttgcgcaagctgctgctgagcaagggcgtggcgcatttccagcgggtcgtgggcaagctcggtccttattccatcgccgcgctgctgctgacgctggtgctgctgttcgcgttccagggccaggccatcatcgagcaaccgctggtgatcgcgctgctggccgtgcccatcctgatccaggtgttcctgaactccggcctggcgtatctgctgaaccggaaactgggtgtggcgcattgcgtggcgggcccgtcctcgctgatcggcgccagcaatttcttcgagctggccgtggcgacggccatcagcctgttcggcttcaagtccggggcggcgctggcaacggtggtcggcgtgctgattgaagtgccggtcatgctgctggtggtcagcatcgtcaatcggacccaaggttggtatgaagcggggcgcaaggcctgacgcccgccccaaggcactccgatcccggcggccgtgatgctcgggctgccatggctcaggccgcttcggtcgagacgccgcggcctttggtggccgccggcttgcatgccacttccggcacgccgcagccctgcggattgccttggcagcaatgttccgtcaggaaggcaatgagcgcgttcatcgtctcgaattgcgcccggtagatcacgaacttgccttcctgcgtattcttgatgagacccgcgtggaccagttctttcagatggaaggacagcgtcgcgggtgcgacacccagcgcttcgcggatccggcccgcgctgacgccgtccgggccggcctggaccagcaagcggaagatcgccaatcgggaatcctgggcaagtgcagcgagcgctgctacggcggtttcattcttcattggtcgaactgtagaggtactggcgcggtccgcgcaagtcaggtgccgtcgaattcaactattctgattggatcctgcttccggcgcccgccgccgcggcggttcccgcttcggggtcttgtggcgccaacgattccttcaaggagaaccacaatgcgtgtcatggtgatggtgaaggccacgagcgaatcagaaagcggcaagatgccaagcacggagttgcttgcggcaatgggcaagttcaatgaagagctcgtcaaggcgggcgtcatgcttgcgggcgagggcttgcaccctagcgcaaggggaaagcgggtgcgcttttcgggcgatcagcggactgtgacggacgggccgttcccgcagaccagcgaactcgttgccgggttctggttgtggcaagtcgagtcaatggatgaggctgtcgaatgggtcaggcgctgccccaatcccatggaaagcgagtccgaaatcgaaattcgcccgctgttcgaggtcgaggacttcggtgctgaattcacgccagaactgcgggagcaggaagagcggctgcgcgctgaagttgaagggcttgcgaacaaggcgcgctgacgggagcccaaacgcacagggcaaggcggttgcctcgccgcccaacgctggttctttcggcgttgtccatctccacggcatggagcaccgtagacctgggtgtcctcttgcggggcgcgccgaatgcaaaaggtgtgcgcgtccatcgaccgtagtcatctcttcggcggctgacctcgcccctgaaggcgacgtctcattggcggccaactgatcctggaccgaggcgcgttggcctttgagcacagtcccgtgcttccttggccttgaccttccaacgatgggaacctctaggctggggtcatcaggcgtgacatggacgtcccaccgcgaatggccgtcgtcttcgcatcatgagcgtgtcatgaaggtaaaaggcacgccggatgacgcagtggatgcccggcccgacaactgaaggaagcagccaggatgaacaggacaagcaacgaacgcgatgcaaccgagcctggccgccacagcgccggtgcacatggctcgactcaggaccagtccggtcctgttcatcacgagcatgcgcatcaccatgaccatgttcatgaaccggctggcactggagccggggcggcgcagcccgctgccgagggaacgatttatacctgtcccatgcacccggagatccgccaggatcatcccggcaactgccccaagtgcggcatggcgttggaaccgttgttgccggaactggatgaaggcgagaaccccgagctggtggatttccgtcaccgcttctggtggacgctaccgctcaccggtgtggtgttcgtcatggccatgttcgggcatcgtcttggctggatggaggtgtcgacccagagctgggtcgagcttgcgctggcgacgcctgtggtgctgtgggcaggctggccgttctttgtgcggtgtttccactcgatcgtcaaccgtagtccgaacatgtggacgctgatcggaatcggcaccggtgcggcctatgtctacagcgtcattgcgaccgtcatacctggcgcatttccgcaggtgttcgccgagcatggccgtatcggtgcctacttcgaggcagcggcggtgatcatttccctcacgctgctgggtcagttgcttgaactcaaggcccgctcccagacttccgccgccatcaagtcgctgctgggactggcgcccaagacggcgcggcgtatcggtcccgacggcgccgaagaggacgtgccgctcgcccatgtccacgtgggcgacctgctgcgcgtgcggcccggcgagaaggtgccggtcgatggcgtggtaacggaaggcaccagcgcggtcgacgaatcgatgatcactggcgagcccattccgaccaccaagcgcgtcggcgaccgcgtcatcggcgccacgatgaacacttcgggcagccttgtcatccaatccgaaaaggtcggctcccagaccgtgctgtcccagattgtccagatggtggcgcaagcgcagcgatcgaaggcaccgatgcagcggatggccgaccaggttgccggcgtcttcgtcgtcggtgtcatcggcattgcggtgctgacctttgtcgcgtggggactcttcggccccgagccgagctgggtgttcggactgatcaatgccgtcgcggtgctgatcatcgcatgtccgtgcgcgctgggtctcgccacgccgatgtccatcatggttgcaagcgggaagggcgcttccagcggcgtgctgttccgcgacgccgctgcaatcgagaacctgcgcaaggtcgataccctgattgtcgacaagaccgggacgcttaccgagggtcggccggcttttgagcgcgcgatcggcaccaatggctatgccgaggaggacatgctgcggttagctgccagcctggatcagggcagcgagcatcccctggctgccgcgattgttgcagcagcccgtgagcgcggcctgcagttggaaaagccggagggcttcgagtcgagctccgggattggggtaagaggcaagttgggaggcagcaaggtcgcgatcgggaatactgcgctcatggaagccgaaggcgttcccatcgatccgctcgtggcgcaggccgatgagctgcgggcgcaaggcgccagcgtgatgtatcttgccgtcgatggcaagcttgctggcctgctcgccgtttcggatccggtcaaggccaccacgccggaggcgctggcgcatctcaggggagaaggtatccgtgtcgtgatggcgaccggcgacgggattgcgacggcgaaggcggtggccgggaaacttggcgttgacgagttccacggcgaggtgaagccggcggacaagcttgaacttgtcagttcgctgcaacaggcaggcgcggtggtggcgatggcgggcgacggcattaacgatgcgccggcgctggcgaaggccgacgtcggtattgccatgggcacgggcactgatgtcgcgatgaacagcgctcaggtcacgctggtcaagggggatttgcgcgggattgcccgtgcccggaaactctcgcaagcgaccattcgaaacatgaagcagaacctcggttttgcgttcgtttataacgcattgggcgttccgctggcggcgggcgttctgtatccaatgacaggcctgttgttgtcgcccatgattgcggcgctggcgatgagcctgagttctgcctcggtcattaccaatgcgttgcggctcaggaaggctgcgacgtgaggcataccggcagctcgggctgccctgtgtggccgctcagggctcatttccattttccccttgctgtattcagagatccgttccaagcgtctggggtgaagtgcgccctacacatgtcatgcactgcaacatttctgcgtaagcacatgtaaatttagagacgtacgatgcacttttattgtcctgttttaaagactttttgggtatatacctagggatcaaattagaggaaaccctctaggattcgcactcggatgctgcgctgcaggattggtggcgctgtcaatccggaagccaaaccgaagcggattcacgttgcaatctgttgcgcgaatccgttcgatcaatccacaggagattttgcatgtccccttttatgcccgagcaatttgctgcagtgcaaaagtccagtctgaaccaactgttcgcgctgacgaacatggcttttgacggcttccagaagttgaccgagttgaacctgcaggcagtcaggacgacgcttgccgaaggccagggcaatatcgaagcggtgctggccggaaaggacctgcgtgaagtgttcgccgtgcagggcaatctggcacagcctgccgcggagaaggcggttgcatatgcacgccatgtgtacgaaatcgcatcgaacacgcaggtggagctgaccaaggcagtcgagggccagtacgaacagcacaaccgcaatgtgcaagccttcgttgacaacttcgtgaagaacgcgccagccgggtctgaagcgatcaccgcgctgctgcaatcgagcgttgcagccgccagcagcacctttcaatccttccaggacgccgcgaagcagacggctgaagtcgccaaggccaactttgccaagaccgccgcagcggcctccggcgcggcccagcaggcggcgccccgcgcttccaagcaataacggcgtgcggctggccaagcaggccaggccagcgcgctgaacatagatcgcaggcttgcaggccacagcactgcgacgccaatcttcccgcatcggtatacaagctgggcccggagtcatccggcccggctcgccctcgctttgtccgcgccagggcagcgggaatgtgctcgggacaatcaggcaagagcccgtcccggcaaggcaggggtctttcaactttacgagaatgaagcaggcaggatgatgaagaaaattgcactggtaacaggtggtatgggtgggctgggagaagccatcagcatcaagctgcacgacgcaggctatgcggtggtggtgacgcactcgccgggcaatgcggccgcccaggactggcttgccgcgatggccgccggcggccgcgagatacgtgcctacgaggtggatgtatccgactacgatgcctgccaggcttgcgcggcgcagatcctggctgacgtaggccgcgtggatatcctggtgaacaacgccggcattacccgcgacatggccttcaagaagatggacaagccgaactgggacgccgtgatgcggaccaatctcgactcggtgttcaatctcaccaagccgctttgcgaaggcatggtcgaacgcggctggggacgcatcatcaacatctcatcggtcaacgcatccaagggcgccttcggccagaccaactatgccgccgccaaggccgggatgcacggcttcaccaagtcgctggcgctggaagtggcaaggaagggcgtgaccgtcaacaccgtctctccgggctaccttgccaccaagatggtcaacgccgtgcccaaggaaatcatggagaccaagatcctgccgcagattccggtcggccgcgtcggcaagccggaagaagtcgcagcgctgattgcctacctgtgctcggaggaagcggcctacgtgaccgggtccaatatcgccatcaatggcgggcagcacatgcagtaagggtgctgggccaggcgccgccaggcgaatgcgcggcgcgggcccgttgcagccgcaccggcccgcgccgcatcgaacccaggtcggcgcggttgccttgcaggcgctgcgacagcaactggtcctcgatttgggcgacgttcgacgttagcactgcacgatgatggttgggggcgggccggatgcctaccagccaaagcgatagtccctggtcggatgcagccaccactttccgttcccgggcagttccagcacctggtggtggaacttcagcagcgtgggccggtggctgacgctgacaagcgtcgactgcatgtcggccagcaactggtacatggcttcctcattgctgatatccagggcactggtcgcttcgtccagcatgacatagcgcggctttgacagcagtacgcgggcgatggtcagccgctgctgctcgccaagggacaggactttgccccagtccacttccgtgtccaggccgccaaagcggccggcgatgtccttcaggttgaccgcttccagcagcttcagaagctcctcgtcagggatccgctggccgatgtggttcgggtatagcaactggctgcgcaggctgccgaccaccatgtaaggatgctgcggcaggaacagcatttcctgcggcactggccgcacgatgcatcccgtgccgttgttccacaatccggcgatcgcgcgcatcagcgaacttttgccgccgccgctggcgccgacgataagaaggccctctcccgggttgaccgacagcgtcaggtcggtgaccagcgttcgctcctgattcggcgtgcgcaaggtcacatgttccagcgccaggcgggagtcatggatggactcgatcgtggtggccggcttcacggaggctgctgccgtcccggtcagcgagatggagaatgtgtccagtcgatccagccccgccacgaagcggctcaggtcttcaaagttgtcgacgatcacggtcagcgcgttcaggatggcggcgaacgcgccggccgcctggatggcgctgccgacttcaagctcgccggaaagcacgcgtgaagcgacgatggcgctgggcagcaggatggtcaggaagccataggcatactggaacatgttcaggctcagctgccacttgatgagccggtcgaaattctggaaggccttgccaaaacggcctctcacatgggatgactccagcgcctcgccgcgatagaaagcgatggactcggcgttctcacgcacccggatcaggctgaagcggaaatccgcctcccgccttagctggaagaagttcaggccgatcaggacgcggccgaagaagaagatggagacaaatgtaccggcaatggcataaatgacaagaaagtagaccagctctcttgagatcgaccacaggacggcgctgaaggcgatgagctgcagcagcgcgccgataccgattgaaaggaagaacagggattgccgcgtgaaggtattgatgtcctcggcgatgcgctggtccggattgtcgatcgcggcatctgaattgagcttgtagtagacccggcccttgaaatacccgtccagatagtgatgcgtcagccagcgtctccagagcaggctcagcttgttcctcaggtagtaatagaccgcgtagatggggacggcaaccatcaggatatagagacacttcctgatcgaggcccagaaacgatccgcgtcttgcgctgccagggccgaggtgaattcaccggtttgctggacgatcagtacctcggtctgggtctggcccaacagcagcaggatcagcaggaccagcaagccggaggctttccatttttcccgcgagaaccagtaaagttttgcaatggcccagtatcgggtccacacatgccgggtggaagtgacgggacgtttccctggggccgaagtggtgccggtgacccgcgactcaggaacggcgctcatatcccatctcccagcactaaccggattgcatactcgccacatggcccggcacgggacacgtgggagaacggcagaagactattaatgaaatataggctagcagcatcgatgcctggctgattcgtggtccctgcccgcagtcaaggacccgaccccggacaggcgagcggagatctggcttgacgcgcgcccggaacctgattccaatccggaagtgacctttccgctatgacagcccctccgcatggaccgcttcgacgcgctgcaactctttacccggatcgtggaactgggctccttcaccggcgccgccagcgcgctggacatgccacgcgccaccgccacgcacgccatcaaggaacttgaggcccgcgtcggcgcgcgcctgctggagcgcaccacgcgccaggtgcgccccacgctggacgggcaggcgttctatgagcgcagcaagcgcgtgctgcaggacctggaagacgccgagacctcgctcagcacgcaggtggccaacccgcgcggcacgctgcggctggacctgcatggcacccacgccaccatgatcatcctgccgcgcatcggcgagttccgggagcgctatccgcatatcgacctgatcgtcagcagcggcgaccggctggtcgacctggccggggagggcatcgattgcgtggtgcgtgccggccagccgcgcgattcctcgctggtggcccggcggctggcggaaatgccggaggtgctgtgcgccagccccgcatacctggccgcgcatggcaaaccggaacacccgtcggagctggcacagcacatcggcgtgggattcttctcgcgcaaccatgaccgccgttatcccttcacgctgaccgtcgatggcgaggtgcaggagttcaaggcgcgcggctggatctcggtaagcgatgccgagtgctataccagcgcggcgctggccggctgcggcctgatccaggtgccgcgcttccgcgtggaagagcacctgcgcgcgggacggctggtgccggtgcttgaggcctggccctgcccggacttgccggtgtcggcgcggtatccgttccaccggcagctggcaccgcgggtgcgggtgtttgtcgattgggtggcggggttgtacgtggagcggttcgggccgctccggggcgcggcctgaggcatcaacacggcgcaatcaggccgccgcggggcgcggcagcggccgtgccggcgcgggtgcggcttgcgccggctcgctgaccggcagtgtcatgccgatccggatcgcgtccgcctgcacctgcgcgaacacgctgccgccgtgcatggtggcgattgccttgacgatggccagccccagtccgtggttctgccggctgtcgctgcgcgcggcgtcggcgcggtagaagcgatcgaacagccgctcgggccggatcgtgtgcaggcgatcggattcattgcgcacggcgatggtcagcgtgtccgccgattgcgcgatcgtgaccgtcaccggccgcccgggccggccgtgctgcagggcgttgctcatcaggttggtcagcgcgcgctgcagcagcgagacgttgacgcgcacgcgtgcatcgccggtcacgtgcagcgtggcgccggcttcctcgaacagcatgtcgaggaagtccgcgctgcgccggacttcctgggcgaccgagacctcgaccaggtcgcgcgccagcgccccgcggtcggactgcgccacgaacagcatgtcgatcacgatgcggctcaggcgctccaggtcttccaggttggactgcaggatctcttcaagctgttcggtgctgcgcgggcgcgacagcgccacctgggtctggccgatgacattgcccagcggcgtgcgcagttcgtgcgcgacgtcggcattgaaggcggatagctgctggtaggcgtgctcgagcttgtcgagcgcgccgttgaaggcatgcaccaggccgcccagctcggcgggcaggtcggcgtcgggcaggtgctccagctgcttggggtcgagcgcgccggcatgttgcgacaggcgctcgatcggcgccaggccggacttggcaatgcgccagccaagcaggctcaccgcgatcacgccgagcaccgacgacatcaccagggcgatgccaagcgtgcggctggtctcgaagaatgccgcctggtccaccgcgaccgcgagcgccacctcggggcgatcattcagcgccgggatgcggcgcttcagcatcaggaagcggtggtcgccgaactccaccgcccacacgtcgggtgcgcgcgggctggtgtcggcctcgcgcgggaagggctcgccgtagtcgaagcggcggtcggtactttcgacaaagtagcgcacgctgtgatcggccggcgtcagggtgcgcagcatggcggcaaagtgctcccattgcttttcggtgcccaggcccgcggccttggtgccggccaggtcgaagcgggcgcggatctctccgagctggcgcttttccagttccacgcactgcacgcggtacagcaccatgccggtgacggtgaagaccagggctgccgccagcccgaacatggcggccagccgcgccgcgatcgagcgttgccggttcatgcgctcaatccgtcgcggtgctccagcacgtaacccatgccgcggatggtatgcagcagcttggcttcgccgggccagtccagcttggcgcgcaaacgcttgaccgcaacttcgaccacgttggtgttgcagtcgaacgagatgtcccagaccagttccgtgatcgcggtcttggacacgatctgcgcctgccgcctggccagcaccgacaacagcgtgaattcgcgtgcgctcagttccaggcgccgcgtgccgcgcgtggcgcgccgcgacagcaggtcgatgcgcagatcgcccacggtcagctgcgacggctcagtctgccggccgcgccgcgtcagcacgttgagccgcgccagcagctccagaaaagagaagggcttggacaggtagtcgtcggcgccggcatcgaaggcattgaggcggtcatccaggtcgtcgcgcgcggtcagcatcagcaccggggtctgctgctcgcggcgcagggacttcagcaccgagacgccatccagcgcgggcagcatcacgtcgagcacgatcgcgtcgtagggctcggtacaggccaggtgcaggccgtccacgccgttgtgcgcggtatcgactacgtagccattctcggacaggccgcggcgcaggtaatcgaccgtcttgatctcatcttcgaccagcaagagtttcattggtccaatcctcggaatctaaacaatatagaagatgtgtgcggctccaacctgtcaatcctgtcagtttcccggtgccgcaccgaagctgtgcggccaggccttgcggcgcgcgctccgcaagcatgacaggagcacgtgccgcttttgttcacactggtggaaaagactgtttgaagacgcgccgccgctccagcctgacgcaattgtcagcgttgcgtcagggtggcgtcggctgcgctccctagactccatgcgtgcccggccgggccggttttcccacttgcacaggagtccttccatgacctcacccaagcgatcccaccaccacgacagcacaggccaccgttccgcgctgctgcgcgccctgatcccgaccttgctgatgatggtcggcgcaagcatttcgttgtcggccaaggctgcaccgcgggccgttgacccgtataccgatggcgcggccagcgcggcgacagccaagggccgcttcgatgtgtacagcgacggcgcccgggtgcgtgaaccgcgcgacacgtacacggacggcgcgcgcagcgagccacggcccgctgacgcgaacggctgagccccgcagcccaccaccacccatgcagccatcacggcctgccattaggtgtggcagcgcccggcaccgccgccaggggccggcgatagcgggacagccggtccagcgcgaggtagaccactggcgtggtgaagagcgtcagcgcctggctgagcagcaggccgcctaccacggccacgcccagcggctggcgcagttccgcgccggtgccgaagcccagcatcagcggcaccgcgcccagcaatgcggccagcgtggtcatcatgatcgggcgcaagcgtgtgagcgccgcctcgtagatcgcctggccggcgctgatgccgcgggtgcgctgcgccgccagcgcaaaatcgatcagcaggatgccgttcttcttgacgatgccgatcagcaggatcacgccgatcagcgccatgatggaaaagtcgaacccgcccagccacagcagcgcgagcgcgccaatggccgccgacggcagcgtggacaggatcgtcagcggatgcgccaggctttcgtagagcacgccaaggatgatgtagaccgccagcagcgccgccaggatcagccagggctgcccggccagggcctcctggaacgcctgggccgaacccaggaacgtgccctggatggcggccggcatgccgatgcgctgccgtacctgctccagccgtgccaccgcatcgcccagcggtgcgcccggcgcgaggttgaaagacaggttgaccgcagggagcatgccgtggtgcaggatcgagaccggcccggcgcccggcggcgcgatgctcgccaccgcggcgagcggcaccatctcgcccgacagcggggatcgcaggcggaacgactgcagcgtctcgatatgcccgcgcccgtcgtcgtcgacttcaagcaccacctgatactggttggtgtcggtctggaactcgttgatctggcgctgcccgaaggcgttgtagagggcctcgtcgatatcggctgaggtgagacccagccgcgctgccgccgcgcggtcgatgcgcatgcggatgacattggcgccgagctgcaggtcgctggacaggtcgcggtagagcggctcgccttgcagcgcgctggtgagccgctgcgaccacgcatagagctcggcggtttcgttgcccttgagaacgtactggtactgggcccgcggctgccccgcgccgatgttgatgtcctgtgctgcgcgcaggtagagccggatgcccggcaccgcggccagcctgggccgcaggcggtcgatcaggccgctggccgagacgtcgcggtcggaacggtcgttgagcacgatccagaagcggccgttggccagggtctggctgccgccggtcatgccgaccgaatgggtgaccgtcagcacggccgggtcggcagcgatgatgtcggcgagggcgcgatgcttggcgaccatgtccgcatgggggatatccgccgccgcctgcgaggtgcccagcacgaatgcggtgtcctgcagcgggaagaagcccttggggatcagcacgaagcctgccacgctggcgcataccgtcaggccgaacaccgccagcacgcgcgcctggcgccgcaggcaccagcgcagcccggctgcgtagcgctgccccagccacgtggacaggtccgcctggcgcgcgcccgtatcgtgatgcgccttgcgcatggcgatgcccgccagcgcgggcgccagcgtcagcgacaccaccaccgagatcagtatcgccatcgccgaggtcagcgcgaattcgcggaagaggcggcccacgaccccggacatgaacagcaacgggataaacaccgccaccagcgacaggccgatcgacactaccgtgggcccgacctcggccacgccgcggcgcgcggcctcgcgcaggccgagtccggattcgcggtagcggtggatgttctccaccaccacgatggcgtcgtcgacgataaagccgaccgccaccaccaccgccaccagcgtgagattgttcaggctgaaccccatcaggtacatcgccgcgcaggtggccgccagcgacacgcccagcaccgccgtcacgatcagcgtggccgaccactcgcgcaggaacagcgccatcacgccgatcaccagcatcacagcgatcagcagggtcagctcgacctcgtgcagcgaggcgcggatggtgcgggtacggtcgttcaggatctccacgcggacatcggcgggcaaggcacgccgcagggacggcagcgcttcgttgatgcgatcgaaggtctgcacgatgttggcgccgggctggcgcatgacggcgagcgccacgcccggccggccattcggaaagccattgacgtaggcgtcttcaggcccgaccgcaacccgcgcgacgtctttcaggaataccgggccgccgttgcgccaggccacgacaagctcgcgatagtcgtccggttccagcaactgcccattggtctccagcgtgctgacgcgcgcctcgccgtacagcgcgcccttgggcgcgttgcggctggccgcgcggattgcgccgcggacgtcggccagcgtcaggcccacgccggccagcgccgccggcgaggcctgcacacggatcgcggggcggcgcaggccggtggcgttgaccagccccacgcccggcagctgcccgagctggcgcaccagcacgcgctcggcgtagtcgctgacttcggtcagcggcagcgtgtcagaggtgatgccaaggatcgccaccggactgtccgcgggattgaccttgcgccaggtcggcattgccggcatgtccggcggcagccggctggtggcgcggttgatggccgcctgtacctcttgcacggcgctgtcgagccgggtctccagcgtgaactgcagcacgatggtgaccgagcccagcgcactggtcgaagtcatctcggcaatgccggggattgcgctgaactgcacttcgagcggtgtggcaaccgacgaggcaatggtgtccgggctggcgccgggcagcagggcgttgacctggatggttggcacttcggcttcgggcagcggtgccaccggcagccggaaatatgcggccgcacccagcagcaccagggcggcagccagcaaggcggtgccgatcgggtgatcgatgcaccagccatatagcgaagaggatgatttcacttcaggctctcggggccggggttgcgatcggcacggagacgcggctgccggcgcgcagccgggactggccgtccgacaccagctggtcaccggcggcgacgccctccagcacgacctgctggcggtcctggtagcgcacgctgacgggcacgatctccacggtgttgtccggcctgacgcggaacacataaggctggtcctgttcgccgtagcgcagcaccgcgggccgggccaccagcgcatcgcgcagcagcccggtgtgcagccgcaccgcgacaaactggcccggccacagctcgccggcgcggttgtcgaactcggccttgacccggaccgcgccattgccggtgcccacgcggctgtcgatcaccagcaggcgcccctgcgccagcggcgcgccgccgtcgcgtgcatgcgcgtgcacggccgcgttcgcgccgccggcgctcaggtgttgcagcaccggcagcgccgactgcggcatggtgaattccacggtgatgggcgacagctgcgtgacggtgaagatcccgtcggcatcgccgacccgcaccaggttgccttcatcgacgttgcgcaagccgatgcgcccggcgatgggcgagcggatgcgggtgtatgacaggcgcacttcctcggcgacgatagcggcgcggttgccctgcacggtggcgcgcagctgctcgacggtggcgagctgctggtccagcgtctggcgcgggatggcatcggcggcgatcagcgtgcggtagcgcccaaggtcgagctcggccgcgcgcagctgcgccaggttcatcgccagcgtggcgcgggcctgacccagtgcggcctggatcggccggtcatcgagcgaggccagcagctcgccgcgggccacctgctggccttcgcgcacatgcaggcgcatcagctggccgtcgatctgcgtgcgcaccaccacgtcgcgcaagggccggacggtgccgacgctttccgcctggcgggcgacgtcgcgtgcctccacgcgcgccacgcgcacaggaacaggcggtggcggcggtgggggcgcatcggactggctgcgccggaccaggccgagcgtgccgagcgcgagcacgcagagcgccgcggctgcaaaccacaaccgtcgcgcataaggcccgagcgccgcgagcagataggaggtgagggagaacgcaggcatggcagtcggacccgccggatccacaagtcattggcatgctggtttatagccaacggaggcggttggaacggtgacgccagcctgtcagggctgtcaggaaggccgcggcgcgcgcgcatgcggtagtcgcagcgtgcttgctgacggctttgccagttgcctgtcagcacgccgttggctgcgggcagctaagctacgcggtttatcgattggcagggccgggccatcatgcccggaatctggcgcacggcagcgacgctgccagtgagggcagacgatgtggaggacaggttgagatccaaccgcaacaagctgaacgcagccagggccgtgctgggtgccatggcactgaccgtggcagcgtgcgccggcatcggcagcggcggctcgctgcccgcgcgcgcgagcttcagcgattaccgtagcgaaaccctcagccagctgcaggcgcggcgccacttccagcttgccgacaaggcagccgaactcgcgtggaacggccccggcgaatggctgccggcgctgtcccgtgccggaacgaagccggagaagggcatcctgctgatccacggccttggcgattcgccgtggtcgttccatgacctcgcccggcagctcgccgcgcagggcttcctggtcaggaccgtgctgctgcccggtcatggcacccggccggaggacctgctggacgtgacgctggaagactggcagcgcgtggtgcgggagcaggccgaggtgctgcgccgcgatgtcgggcaggtctacctgggaggcttctccactggcgccaacctggcacttgaatacgcctacgctcacccggacgtggcggggctggtgctgttttcaccggcattccagtccaacagccgctacgactggctgaccccgctgattggctggatccgcccatggctgctggagccggacgggcgccggccgatgcagaacgccgtgcgctacatgacggtgccaaccaacggcttcgcccagttctaccgcagcagtcgcgcggcgcgcctgcggctggagcagggggcctacgacaagccggtcttcatggcggtggcgcagcacgattcggtgctcgatacccgctatttgctgaccgtgttccaggacaggtttacgcatcccgcaagccgcctgatctggtatggccagaggccggaaaccacggcggacagcggccgcgtgctggtgcgtggcgatacgctgccgcaattgcggatcagccagttctcccatatgggtttgctgttctcgccggcgaatccgctgtacggggaacagggccgcctgcgcatctgctggaacgggcaggatgagttggcgacgcgggcttgcgagcgtggcgaggccgtgtggtattcggactggggctatcgcgaagccggcaaggtgcatgcgcggctgacgttcaatccctatttctcctggcaaggcgaggtgatcgcgggggttttcgccggcgcggacttgcgtgccggcgaccgtgcgccagaaacgcagcgcatgacgcgggacgacaacggcagcagcccgcaggcgatgtaggcgaatgcaaggcaggcaagccaccggcagtccgcgcccggctccgccgcatggaggaaaacccgggcctgtcccacggcgcatcagcctctaacatgaagtacccgccgccatcgcggcaaacaacgataacgcggagacttcacacatggatcgtcgaaagttcctgagcgccgcggccatcgcggcgaccgccggcgtcgcgccgcacgccatcgcgcagcagtggccggcgcgcgccatccggctggtcgtggcctatccgcctggtggcggcaccgacgtggtggcacgtttgtttgccgactacctgacgcgcgtgaccgggcagtcggtggtggtggagaacaagcccggcggggccaccattcccgccacgcaggacgtgatccgcgccaggaatgacgggcagacgctgctggtgacgctgggttcctcggccacctcgggcgcgcatatcaaccgcgttccttacgacccgttgaccgacctcaccgcgctggcggaacttggccgcgccccggtgctgctggcggccaacaaggatgcgccgtactccacgctgaaggaactgatcgcctattccaaggcgaatccgaccaagccgatccactcggcctcgtacggtccgggcacctcgtcgcacttcggtccgctgctgttcaaccggctggcaggcaccaaccttgaaccggtgctgtacaagggctcggcgccggccacgcaggacctcgtgggcggcgtggtgccgctgatgatcgacggcctgaccaccggcgtgccgctataccaggccggcaagaccaaggcgctggccaccaccatcccggaacgctctgatctggcgcccggggcgcctaccttccgtgagcagggctttcctgagatggagcagctcagcggctatttcgcgctgttcggccccaaggccatgcccaaggccacggtcgatgcggtctctgctgcggtgcgcaaggtgctggccgacccggcctaccagaagcggctggcaggcgttggcgtgctgccgccgcaggcggtcacgcctgaggccttcgccgcgcagatccggaccgatcatgcgcgctgggggcagttcatcaaggatatcggcttcaagatcgatgggtgagggcgccgcggcagcgtcggcgtgtgcgcgggtgcatcggcgtgggtggcgagaggcggattcttgtccatactgaacttgactggcgggctgtcgctgcccgccgggatcaatcgcccaaggagaagaatcgtgttcaagcacatcttgctggccaccgatggctcggaactgtcaaaaatggcaatggatgcggccattggctttgtcaaagccggcggcgccaggctgacggcctatacgtgcatggaagagtatccctacgtggcgtcaggcgatgccggccatcccaggcgcaaggccttcgaagagcaagaggccgcacatgcaagcgccaggctggaagcggttgttgctgcggccagggccgcgggagtcacatgcgaaacggatatgacgacttcggtaccctacaagggcatcatcgatgcggccgcgaggcacgggtgtgacgtgatcttcatggcgtcgcacggccgcaggggcctggaggggctgctggtcggcagtgaaacccagaaggttcttacccactgccgggttcctgtcctcgtctaccgctagacactgcgcggcgtgccgccgcgggtgctggcgtactgtcgaatccacctcacggggggaacctgccatgacggaaatggaacaggagaaagtcgtcggtgtgctggatcgaatactcgaagccgagctcgccggggtagtgcgctacacgcactattcgttcctgatattcggcttcggccgcattcccatcgtgtcgtggctgcgtgagcaggcgaatgagtcgctgctgcacgcgcaccaggccggcgaatggatcacgaccctcggcgcctatccctcgcttggcatcggcgagctgctggacacccacacgaccgatatcggcgcgatcctgcgtgaatcgctcgcgaccgagatggaggccctggacctgtaccgtgagctgctaagcctggtcgaggggcgctcagtcgcgctggaggagtatgcgcggcagttgatccagctggaggaactgcatgcgggagaggtcgagaaaatgctgcgcaagcccggccttgcggcgacggtgcagccgcgacagggctgatctgggccggcccgctgccttctcgtgcgtgcaaaagcgcgcgtgccacaaggtttcgcccccattgctttcgtccccgacgccgggagcagggcacaggccgcgtcaccgcaccggccatccacccccatcgcgcgccgcgccaaccgagctggttgccagcgccaatgtcgccgcggcggcgagcgctccgtgataggcgtcagctgacgcgttccgtgccggcagcaactggttctgtgccaggttggcttcggtgaggttcgcatgtgcgcggctatggcaaatgcttgccgggaagcgtgggtgcaggtccgcgcgtgctgaccggacgtgcgctacgcggatcggcggcttgccggcctggctttgccgtattgtccctgcgcccagtgggcgtgccgcgactgctgtcggtgcggtgcgtcggaccggagaacgcgccgatcctgacttcctcgcccatccccccgacgacatgctgcgcaaaggcggcccccgaggcggtcagcatggcgattgccatcagcgggtacgcgtggatcttcttcatttttgcctgtttttcgtgtggtgggcccgggcgggcaaggttcaggcagcggagggtaaatcaagcggatgtccgtgtatgtaagctattgttagcgcgatttgctccgccaaccaaagaatatgaaaagtgcttgttagcgcatgcgcgatcaaagcgccgcggtgaaaggcgggataccggccgcgaccatcagcgccatggatagcgggaagagggcgctgatgtgtgccgtggcgctggcgaaggagtagtgagcgtagcaatagatcgccgccaccagcatatagacggccagccggtggaagccctcgaggtgtgccccgaactccttgccgaaccaggcaaccatgccgtactcattgagtttggaggccagcatgatcagcaggccgatccagatcatggtgtcccaggcggatttctcgttcagggcatcctcccaggtcagcacgccggtgatgaacagcagcgagacgccgagagccgccgccagcgttgcgccgatggccaggtcctcaccgaaaatccagagcaccagcaagccaaggaaaattgccgccatgatgatttccttggcgccgatgatggcgacggccgccatgggcaggggcggtcatgatgccggcgatggtggtgacaaataccgcgaacatgtgccacgccttcaccgcgaggccggccggcgccggcaggaaccagagcacgatgccgattcccaccgggactagaaatctccagagatctttgagatgccctgcgggggccgctggcttcgcggcgggggagcttccagcgcctggccttcggcccggattcgcgcaacatcgatgatgaccacctccgcgctcgggatagccacggccgcaaacagggccgccgagccgccaaccagtcctgcgccgaccacgacgatcttgggttgatgcattggcatgcctccgacgtgcgtggatagtcgaatacctgaatcaggggccagtccgtgaacgccgacgacaaatgtggcgtgagggacgcggggcaggcgaataaccgttcgtatgctatggtttatagacctttccggtagaagcgccggcgtcgtgccggcgccgccgaacgacggcatgccagcagacggggctcgaggagtaagtcatgcatcccagcaagctaatcgtggcggcgatacttgccgcggcaactcttccggtgctggcacagcccgagacgcgcgtggacacggtgtcgggcgtgggggctaccaggaccaccggcacggtcaaggccactgccacggtggtggccatcgatgccgccacgcgcaccatttcgctcaagaacaagcagggcaaggtcacggacgtacaggtcggcgaggacgtgcgcaacttcgagcagctccgcgtgggcgacatggtcaccgtcgagtacacgcaggccttgtcagtggctctcgccaagcagagcggcatgcgctccagcaccgaacgcgagaccgccgagcgggccgctcctggcgccaagcccggcggcatggtcgggcgcgaggtgacggtcactgccgatgtggtggccgtcaacgccaagaccggcatggtgacgctcaaggggccaaagggcaagacggtggacgtgcatgtcgaggatccggagcaactgaaggcggttagacgcggtgaccaggtgcaggccgtctacaccgaagcccttgccatttctgtcacgcccaggcgtgcccgctgagtaaggcggcgccgggtgggagcatgccaatgggttttctgcggtggttgcgctggcgcaatgcgcaagtccatgcgcacggcaagcaggagattgccgagctgaccgagcgcgtgacccggatctatccgcgcttgcggctggtgtcacgctaccagcagcggcttcggcctgcgctcgagcaagcgcaggactacgtgcgcgaactcgtccagggtcttcccgcgccgcgggaagccagcatgcaggcatggggtgacgatccctatgttcacgccttcttcggcgcgccgcgtgacgtgccgctggccttcagccgctctcctgaactgcgcgcgttcttcgaacagtcgcccgatgcgccgcaggcgtttgcggtgctggggatggcgatgaccgagcggcgcacgctcggggttgcgctggaaggggatgtcatgcgcacggaagtgccgcaaaccaccgtcagtttcggcgatcacaaggtcaggatcatcgctcgcagcgaggccgcgctgcgcgaggaaattgtccggcgcatgttcgatcagttcagcatggagggtctcgcccgtttcgctgccggcaagtcacgccgcgacgtgctcgcgcgcgagcaggcgctgctggtggcgcgcctgcgcctgctccagcagcaaggcaccggcatgcgttcggtgctcggcggcgatgccgacgcaagtcccggcgagcaggccgccctgggcgggcagattgccgcgaacgagcaggaacttgcgcagctcggccccgaaaccggggcgcttgaccgtcaactggaatgcctggccgaggtcctggcggacgcacgctcctgcttttccatcgagcaaagacacttgcggcttagtgccatgaacgtgctgctcgcggcggacagcgcggggccggcatacgacatcgacctgctcactgcccacgtcccgggcgatcctccactggtgcgatccatcgcactggtgcggttcgcgcgtggcgacatgctgtcgccgaccgccctgatcgaggaggcggagcggctgctgtgacagcggggatggtggcgcgccaggcagtggagagcggcgcggtggaatgcgcgctggcgctgggcttcgagttcatgcagccgggcccgctgaagagcgcgtggactgaccgcgaggcggccatggtcgagttcaccaacatcgccgccccgatggtgcaggatgcggtcgaggccggcgtgcccgcgcgcgctgacgctgttcggcggcgccggccgcgagcacatgcagcgctacggcaccaggctggagaccttcgccaggatccgcgccaaggccagccgccacgctgccaacaacccgctggccgtgttccgcaccgtcgtcacggaagcagacgtgatggccgagaaggtgatgtggcccggcgtgatgacccgctcgatggcctgcccgccgacctgcggcgccgccgctgccattgtctgcaccgaagccttcgcgaacaagcacaacctgcgcaccgacgtgcgcatcctggcccagtcgctgaccaccgacgtggccccgagcttcgagccgccttcgatgatcggcctggtgggcttccatatggccgaggcgggcgcgcaggccgtgtacgagcaggccggcgtcggcccgtcggatatccaggtctgcgaactgcacgattgcttcgcgcagaacgagctgctgagctatgagtcgctgggcttcgccagggccggcgaggccgagaggatggtgcgggacggtgacaacacctacggcggcaaggtcgtggtcaacccgtcaggtgggctgctgtccaagggccacccgctgggcgccaccggcctcgcgcagtgctacgagctgactcgccagatccgcggcagcgccggtccgacgcaggtggaaggcgcgcagctggcgctgcagcacaacctcggcctgggcggcgcctgcgtggtgacgctgtacggccgcggctgaaccagatcccgacaatccagaggagatcagatggctgacaagagcatgattggcatggacctcggcaaaggctccatcgaggtggagaaggggcgcctgcgcttcttcgccaaggcaaccggcgaaacgaatccggtctatatcgacgaagccgccgcgcgcgacgcggggcatcgctcactgccggtgccgccgacgttcttcatgtgcctgaacagcgatgtgtcggccgcatcgggcatcgaccgcatgaaggtgctgcaaatggacctgggccgcatcctgcacgctgaacaggccttcgactatcaccgcatggcctacgccggcgacacgctgcacttcgacacgacggtcagcgacgtccacgacaagagggggggcgctgcatcttgtcgtcaacaccacccgcgtgaccaaccaggacggcgaacatgtcgccgacatgcgcagcaccctggtggaacgccgcggctgatcgcgcacaaggagaacagaaccatgcaagcccccccgtttcgccgacgtgaaggttggcgacaagctgccgagaacgcattgccggctacaaggtcccccgcagcgttgaattcgtggaggcgttgcctttgtcgagcgtcggcaaggtgctcaagcacgaacttcgcaagcaacactggaagtcggcgtttgctggcatgcagccttgctcaagcttgcatgctgaccgctgcttcacgctgcgtgggcaccacgaccgggttcaggaatgccggcgccaggccagtcaactgttccgcggccgctcgcaagggcggcaggaagcgcttcaccgcttcctccctcgtgacttcgcccgagggcaggttgacgctgatcgatgccaccacgttgtggtgttcgtcgcgtaccggtacggcgaggcctgcgatgtgctggtcgaattctccatccacccacgcatagccatcgcggcgcacggcagcgaacgcttcaagcaatgctgccttgtcgtgcacggtgcggtccgtgtaggcgcgcagggaggcctcgtcgagaaactgcgagagaaattccgtggtctggaagcccagcaccgcccggcctggtgctgtggcgaaggccggcacatggctgcccacgccaagccccagtgagcggatcttcagcgacggaatgcgcaggacatataccgcatcgtgcccgtcgaacacacacatgccgcacgactcggtgacctgcgtccacagggtttccagcgcgcgttgcgcgtgcccccagaagggcagcgaggtcaggtaggtcatgccgagggtaaggatcttcggggtcaggcgaaaaccccgcgtttcggattccgccgcatagcccagctcgcacagcgtgagcaggatccgccgcaccacggtccgcggcaggccagtggatgccgtgatgctggcaacggtgtgcgtgccgctgcgcccgagcgcgtggataacggccagtccgcgggcaaaagagcgtacgaagccatcgttgtcggtagtagtcatgtctgtacgaggtctgatttcaggttgacattgtagcaaggccggacgtaaagttcgaaaaaacgggcggtaatgaccgctaggcggacataagtgtccgaaaaaaattaaacaggagacaaccatgaagcggcgttttctttgccaggcgctagcctgcctcgctgtcgtgtccacctcgggccttgcattcgccagcccgtcccccgagaccttccaggccaagcgtcctttgcgcctgatcgcgccaagttcgcccggcggcatccttgacctgaccagccgcctgctcggcaagacgctgttctgagcagctggggcagcccgtcgtcgtggagaacctgcctggcgcgggcggcgtgatcgggatgcaggccatgctgcgcgcggaaccggacggccacacgctggtgatgggcagccttggccccaatgcggccaactacgcattgcacgacaagctgccttacaagttcgaggactttgcaccggtggcgcatgtgctgacgatgccggacgtcgtggtggtcaacccgaaactgccggtcaagaccattgccgagctggcggcctatgccaggacgcgccccaacggcttgtccatggcggtgtcgacgagcggttcttccggccatctcgccggggacctgctgaagcagcgcgccggcattaccgccgtcgacgtgatctatcggggcgcatcgccggcgctgaccgacctggtggcggggcaagtcgatttcatggtggacaacctcatcaccgcattgccgctggtgcgagccggcaagctgcgcgcgcttgcggtcacgacaaggcagcgtgccccggaactcccggatacgccgaccatggccgaatccggttaccgcgacttcgacgtttcggtctggctcggcctctttgtctcgtccagaacgccgcccgcggtggtgcaggcgttgaatgttgccgtcaacaaggcgctggccgatcctgctctgcgcgagaagctggcgcagcagggcggtacggccgcgggcgggtcgacgcggcagttcgacagcttcgtgcgcgccgaaaaagcccgctgggagcaggtcatcaaggacggcaacatcaagcccgagtaagcgcgaacaaattcatcactctcttcttgcagacaacgccatgcaaaacaatttcaaggacaaggtcatcctcgtcaccggagccggcaatggcatcggccgtgccattgccatgctgctcggcgcgcagggcgccagggtggtcgtcaacgacctgggctccagcggcagcggcgagggcagtgatgccggaccagcccagaaggtggttgacgagatccgcgcagccggcgggaaggctgtggcgaacaccgattcggtcgcgactgcggagagcgcgcaggccattgtcgataccgccatccgcgagttcggccgcatcgatggcgtgatcaacaacgccggcatcctgcgcgaccgcatcttccacaagatgagcaccgctgaatggcaggcggtactggatgtgcacctgaacggcgcttactttgtcagccgtgccgcggcgccttatttcaaggaacagcaaggcggcacctacgtccacatgacctccaccaccggcctggtcggcaatttcgggcaggccaattacgccgccgccaagcttggcatcgtggcgctgtcgaaatccatcgcgctggacatggcccgcttcaatgtccgttccaactgtattgccccgttcgcatggagccgcctgatcggcacgctgcccagcgaaaccgaggccgagaagaagcgccttgagcggatgcaggcgatgaagccggagcaggttgccccggttgccgcgttcctgtctggcgatgattcggcggacgtcaatggccaggtgctggccgtgcgcggcaatgagctgatcgtcatgagccagccgcgcccggtggcgtcggtgcatcgcgccgaaggctggacgctggagacgctggcggagcatgccgtgccggcggtgaagcgcgctttcacgccgctggagcgctcgcccgaggtgttttcctgggacccgatctgagaacggaggtacgcagcgatggccatcgactatcaccgcctgcgctcgtgggcgttctttgaccaggtttccagctatgcggcgaatgacaacattcgctatgcgctgagcctcggctttggcaccgatccgatggacgaggcggacttgccctttgtctttgaggaaggactgagcgtggtgcccaccttcctcgccaccgtcggcgcgccaggtgcatgggcaagcgacccgggtacgggcatcgactggatgcagatcctgcacggcgagcaccggatgcgctttttttcagtgcccgcggcgtctggcgcggtacgcagccagacgcgcgtcagccgcgtggtggacaagggcgccggcaagggcgcgctggtggtcactgagcggcgcatcgaggaccaggccagcggcgagttgctggcgaccgtcgagcatgtgtcgttctgccgggctgatggtggctttgcctgcgccgccacgcccggcgatgcaccgctcgagccattgccggcggtgccggagcgcgcgcctgacatgatcatgtcgatgccgacccagccttccgcggccttgctgtaccgcctcaatggcgatcgcaatcccatccacgcactgcccgccgccgcccggcaggccggcttcgagcggccgatcctgcatggcctttgcacttacggcatggcatgccgggcgctgctgaagcaggcttgcggtggcgatccgtcgcgcctggccagcctttcggtgcgcttttcatcgccattcgtgcctggtgaaacgctgcgcgtggagatgtggcgcggcgaagggcaggtccggttccgtgcgctcgcagacgagcgcaatgtggtcgtgctgagccacggcgtcgccgacctgcatccgtaatcaaggagtcaagatgtccgtgatcgagcaattcgcccgtgccacgcccgaccgggttgcctaccgcatggtgccgtccggccaggcggtgacgtgggccgaactggagcagcgttcgcgacagtgcgctgccgcactgctggctgccggtctgcgcgagggcgacggcattgccgtgctgctggagaaccatgtccgctatttcgagatcctttgggccgcgcaccggatcggcttgtactacaccacgatcagccgtcacctgaaagccgacgaggtggagtacatcgtgcaggactgtggcgcccgggtactgttctgctcggcgcagacccttggcgaccttgcgcccggcgccctggcatcgcttcgggtcacgcgggtgcttctggatgggagcgagccgggctacagcaactatgaagcgtggctggagcagatgccggccgatgtcacgttgccgcgcacggtggagggaactgacttctcatattcttccggcaccacgggcaggcccaagggcatcaagcgtccactgcaaggcgccaacgcttttttccgcaccggtgatgacgctcgcctgggctggaagtcgctggaccgcgatacggtctacctgtcgaccgcgccgttctatcacactgccccggtgcgctggaacatggccacgatgcgcgccggaggcacctcggtcatgatggaaaagttcgagccgctggcggcgctggatgcgatcgcgcgctacggcgtgacccatagccagtgggtgccgaccatgttcgtgcgcttgctgcggctgactgcggcggagcgcgagcgcttcgacctgtccaccatgcgctatgcgatccacgccgccgcgccgtgtccgatctcagtcaagcagcagatgatcgactggtgggggccgatcctctatgagttctacagcggcaccgaactggtcgggcgcacctcgctggactccgtggaatggctcgcgcacaaggggtcggtcggacggcccgagttcgggcaggtacacatcgtcggcgacgatggcaatgaagtgccgcagggccagaccggcgtggtctacttctccggcggcgggacctttgcttaccacaatgatccggagaaaacccggcaggtctataacgaccgtgggtgggccacctatggggacgtcggctacgtcgatgccgacggcttcctttacctcacggaccgccttgccaacaccattgtctctggcggcgtcaatatctatccgcaggaatccgagaacgtgctgatgagccatccggcggtcttcgacgtggcggtggtcggcgtgccgaataccgagttcggcgaggaagtgaaggcggtggtccagttgcacgagcctgagcgggcgtcgccggtcctggccgaagaactgatcgcgctttgccgcagcaggatctccccgatcaaatgcccgcgctcggtcgacttcgtcgcggcgctgccgcgcaccgaaaccggcaagctgctcaagcgcgccgtcaaggccagctactggccaaccgaaaaccgaatcgcgcattgagcgcaactgatgccatgtcccgacaagaagccagctaccacgcgccgcgcaagatgttcgcgccggagcacgagatgtaccgcgacagcgtcgcccgtttcctggctgacaaggtcatgcccggacacgccgaatgggaagccgctggcctggttccgcgcgatctctggcgcgatgccggcgcccacggcctgctgtgccccggcttgcccgaagcctacggcggtgccggcggcgacttcctgcacagcgccatcgtggtggaagagatcgcccgggccctggccagcggcgtgacggggttcaccacgcactcggagaacgtcgcgccgtacctgctggagttcggcaccgaggcgcagaagcgtgagttcctgccgcgcatggccagcggcgatgtggttggatcgatcgcgatgaccgagccgggggcgggtagcgacctgaaggccatccgcaccagcgctgtcaaggtggatggtggttaccggctcaacggccagaagacctttatcaccaatggctaccacgctgaccgcgtgctggtgttcgccaagacagagccggccgccggtgcgcgcggcatcagcctgttctgggtcgacaccaccagccccgggttcagccgcggccgcctgctggacaagatcggccagaaggcccaggacaccgctgaactcttcttcgaggacgtcctcgtgccggacgacatgctggtcggcgagcgcaatgccggcttcggctacgccatgagcgggctggtgcgtgagcgcctgctgatcgccttgcgttgcgccgtggcgctggaggtggcgcttgactggaccatcgcgcatgtcaaggaacgccgtgccttcgacaaggcgctgatcgacaaccagttcatccgcttccgcctggccgaaatcaagacgcatgcgtgtgccacgcgtgccttcgtcgacagctgccttgaacaatacctggccggcacgctgacgcccgatggtgccgccatggccaagtactgggccggcgaggccacgcgggccatcgatgacctgatgcagttctttggcggctacggctatatgcgcgaataccccatcgcccgtgcctacaccgacgtgcgtccgaaccggatctacggcggttcggccgaaatcatgcgcgaagtcatcgcgcgcgcactctgaattcaccatgaccaagaacctctctcgctcggtcgccatcgtgggtgccgcggaatccgacctgggcaaggtgcccggcaagacggcactggagttgcaggcgcaggccgcgcggctggcgctgcagggcgcggggctgtcgctgcgcgatgtggatgccgtgttcgcgcataccgatgaccgctttgccaccgtgcagctggccgaatacctcggtatccagccacggtacgtcgactccagcaacgtcggcggcatgtccaacctgatgcacatccgccatgcgatggcggccattgccgccggcatgtgttcggtggcgctggtgacctatggcagtacgcaactgtccgacggctcgcgcaagagtggcgccgtcgccccggatacgccggagtcgccgcgtggccagttcatcgcgccttatggccagctcagcccgatcggctactacgcaatggttgcccagttgcacatgcatcgctacggcaccacgtccagggatctcgccgaggtggcagtggcggcgcggcgctgggcgcagctgaatccgaaggcataccggcgcgagcaaaccagcatcgaggaggtcatggcgtcgcctgtgatcgcgtcgccgctgcgtacgcgtgactgctgcctcgtcacggatggcggtggcgcactgatcatcacctccgccgatcgtgcccgagacctgaagtcgaagccggtctatgtgatgggcgcagccgagaccttctcgcaccactacaccccgttcagcacggcggactggctggatacgcgcgtcgccgagacggcggacgaagcgttcggcatggctggcgtcacccgcgaagacatcgacgtggtgcagatctatgaccacttcaccatcggcgtcatccagtcgctggaagaactgggcttttgcaagcgaggcgagggcggtgccttcgtcgccgatggcgccctgggcccgggtggccgcttccccatcaatacctccggcggcggcctttcctacggccaccctggcatgttcggcatgttcgtgctgatcgaggccgtgcgccagttgcgcggggagtgcggcgagcggcaattgcccgatgccgaactggcgctgtgccatgcgcccggactggtcttctcctgcaacaccaccatgatcctcggagtctgaagcatgagcgaagcacaacgtcccctgccgcgtcccaccgagatcaccgaaggctactggcatgcggcggcgcagggccggctggtggtgcaaggctgccgcgcctgtggccaccgccagttctatccgcgcacgctgtgccttgcgtgcgaatcggaccaggtcgactggacggaggtctgcggctttggctcgatctataccttcaccatcaaccatcgcgcacccaatgccttcatgaaggcgcggctgccgtacgccgttgccatcgtcgaacttgacgaaggtgtgcgcatgatggcgaacatcctcaacgcatcgcccgaggccattgctatcggcaagcgcgtgcgagtggtgttcgagaaggcgagtgacgacgtgagcctgccgcagttcgaattgatcgactgacccaatcctgccccaaggagggcccatgcccatcatcactgtgccgcggcggcgtgctgccctggccgcgctggcgtgcatcgccgcactgccggcctggtcgcacgccgcggacgattctgcctatccgcaaaagcccatccggctggtcgtgccattcccggccggaggcggatccgacaccgtggcccgcttgctcggccgcgagctgacggcgatgtggggccagacggtggtggtcgagaacaggcccggtggcagcggcgcgattggcacaggcgcggtcgcgaaggctgcaccggacggctatacgctgctgttgggcgcaacgccgctggtgcagttgcagggcgcctacaagtcactgccctatgacaccttccgcgacttcgcgccgctggcgcgcctggcgctctcgtcggacgtatttgccgctccggtatccacccgcgttgccagcgtgagcgagctgctgtccgcggcccgggccacgcctggcaagatcagctacggctcctacggcaacggcacctcctcccacatgcacggggaattgctgcggatgcagggggacgtcgacctgacccacgtggcctacaagggcggctcgccactgatccaggacttgctgggtgggcaggtgagttccgggtttgtggatgtggccagcggcaaggccgcgctcaactccccgaagatcaaggtactggccgtcacgggcgagcgccggctggcgctgctgccggaggtgccgacctttaccgaactgggctaccgtgatttcgagccaaacggctggtatggcctgttcgtgccggcggcgacgccgaaggcggtgacggacaagctatccgcggcggtgctggcaatcctggccaagccggccatgcaaacggcgattcgtgagcaaggcctggagccgggaacgctggagcccgaggcattcctgaagctgatgcggcgcgacgccgagatctggggacggatcgcggccaacgcgcgcatcacgcttgactgagcggtgtcgcaggccgggccgccctccctgttccggggaggccgcgcctggccggacggctgatagcctccaagactccaacgtactgtacggaagaccttcactttcatgctgaatcagggggatcgttcatgctttccggtgtaaaagttgtcgagatttgcgggatcggtccaggcccgttctgcgcgatgcacctcgccgatctcggcgccgatgtgattgccgtggaacgcgcggcaccggccaacgatgcggcgctatccaccgaaggctacgtgctgaaccggggcaagcgctcggtggttgccgacctgaaaacggccgaagggcgtgagctggtgctggcactgatccaggatgccgacgcgctgatcgaaggcatgcgccccggcgtcatggagcgcctggggctgggcccggatgtctgcctgcaacgcaatccccgcctggtctacgggcgcatgacaggatgggggcagagcggcccgatggtgcaggccgcggggcatgacaacaactacatctcgctttccggcgcgctgtactaccacggcacgcctgcagagccgccgtcgtcggccattaccgtggtgggcgacgtcggcggtggcgcgctttacctggcggtgggcctgctgtcaggcatcctcaacgcccgcgccaccggaaagggaaccgtggtggatgcatccatcgtggatggctcggcccatatgctgcagctgttgctgtccacgcgccgcaagggcttcatcaccggcgagcgcggcaacaatatccacgatgcctctcatttctattcgacctaccgctgcgcggacgggaagttcgtcacgctcggctcgatcgagccgcagttctacgcgctgctgctggaaaagctgggcctgaccgaggatccgcgcttcgcccggcaatgggaccgcgagcgttggccggagctgcatcggcacttcgaagaactctttgccaccaggactcgcgcgcaatggtgcgctctgctggaaaacaccgacgtctgtttcggcccggtgctgagcccggaagaggccgccgggcatccgcaccttgccgcgcggggcgtctacttcgaagcggagggccatctgcaggctgcccccgcgccgcgcttcgatggcaaggccatggcggcgggcgcgattccacggcgcggccagcacactggcgagattatggccgcaacaaacgccagccaccccagcggcatctggaagaccggctgattgttgatgcgctggccaggccaagagccggccggcgcggttgcgcgctggacgatggccatgacgtctcggcttccaccgcggcatgaccgcgggctgctgcttcccgaaatttcccactcgatcctgaacggtgccttgacggctccgcgctatgccgcgtcggctgctgtcgacgcgatgccatggcatggcaggcggcgagtgcggctgcacgttcccgcgtgaggcacttccacgagaaaacataaggttttcttatcaaatcgggatgaatttctaactggaagctctcgtgccaggaggccatcatgcagcagtcagacacgcttcgaatccacgtacgagccagcatgcgatggccacaagggcagaagatggcagagaacaatatcactcaggacgcaacgatttcaggcgcacgtcctttgacgtcaggcgccgaacgcaaccgtgagcacatgctggcgatgctgggccaggtgcgggaactggagcaacggacggtcagaaaatctgcaagggcggcagattcatttcatgcccgaggcaagctgttgccacgggagcggctggcgcacctgctggacgccgaccgcccgttctttgaactcatgaccctggccgggtattgcggcctcgaagatccggacccggccaccagcgtacccggtgcggcactcatagtcggcatcggctatatcgagggggtgcgctgcatgatcgcggtaaacgactcgggcatcagcgccggtgcgatgcaggcgctgaccggccagaagctgattcgggcgcaggagattgcgcttgcccagaagctgccatttgtccagttggtcgaaagcgcgggggggaacctgcgcaaataccgggtcgaacgcttcgtcgtgggtggcggcatgttctacaacctggcgcggctgtccgcggccggcgtgccggtggtgtctctcatccatggatcttcggccgctggtggtgcctatctgccgggactttccgaccacgtcatcatggtgcggcgccaggcccatgcgtacctggccgggccctcgttgctgcgtgccgcgacaggcgaggaggcgagcgatgaggagctcggtggggccgacatgcacgccagcgtctccggcctcgccgaccacgtcgccgacaacgatcttgatggcattgcctgcctgcgagaggtgatggatacgatcggttggcgcgatgtgccgggcggcgagagctgggacgagccccttgagcctgccggggacctgctgaggctgatgccggtcgacacccgcacgcccgtcgacatgcgcgaagtgattgcgcgcattgtcgatggatcccgcttcagggaattcaaggcgatgtacggggctcacaccgtctgcggtcatgcccgtatccaggggcaccacgtggggatcctgacgaacaatgggccgctcgactgcgatggctccaccaaggcggcgcagttcatccagtcgtgcgtgcagttgggccggccgcttgtcttcctgcagaacatcaccggcttcatggtcgggcgcgagcatgagcaggcggggatgatcaagcacggcgccaagctgatccaggcgctgtccaatgcgccggtgccgcgcctgaccatattgtgcggttcgtcctttggcgccggcaactatggcatgtgcggccgcgcctttcgccccgacttccttttctcctggccgaatgcgcgcacggcggtcatgggcggcgagcaggccgccatgaccatgcggctggtcgccgagaacgccgcccgccgcagcggaaactccgccgacgaacgggcgatcgaggccgagagccgcgacatcgtcgctaccttcgatcgtcaatccagcgcgatccacaccagcagcctgctgctcgatgacgggatcatcgacccgagagacacgcggtcctggctgggcatggccctggccacggtggaacaggcgaagcaccgcaccgtgcaaccgatgcagttcggcgtcgcccgcctctagccacaaggcggcgctgcgcgccggcaccttcgcgtgccgggcggcttgccgcgccccatcccttcgaaccacaaggagacacgaaagatgatgacccccgaccacatcgcgctgcaggatagcgtacgcaagctgatcgaccgggagatcgaaccccatgtcgaaaaatgggaggctgacgaaatctttcccgcgcacgaagtgttcaagaagctcggctcggcgggttatctcggcgtgaacaagcccgtggaattcggcggcatggggctggattactcatatgagattgccttttgcgaggccatcggcggcatcagcgcaggcggcgtcggcatggccatcgcggtgcagactgacatggcaactccggcgctggcgcgatttggctccgacgaattgcgggagacctttctcaagccgaccgtcgcgggcgacttcgtggtgtgcctgggcgtgtcggaagcgggtgccggttcggacgtggcatcgctgaagaccacggcgcgcaaggatggctccgactatgtgatcaacggctccaagatgtggatcacgaacgggctgcaagccgactggatgtgcctgttggcgaacaccagcgatggagatatccaccgcaacaagtcgctcatctgcctgccgctgagggaaggcgggaagctgcgtcccggcatcacgatgaacaagatcaagaaggtcggcatgtggtcctccgacaccgcccaggtatttttcgacgacgttcgcgtgccccagcgctaccgcatcggagatgagggcatgggcttcacctaccagatgcgtcagttccaggaggagcgcctcagtggcgctacccgccgggtcaccgcgctcaccaatgcgatcaacgaaaccattgaatacacccgtcagcgcaaggcattcgggcgctcgatcctggacaaccaggcggtccatttccggctggctgagctgaagacggaagtcgagctgctgcgatccgttatctaccgcgcggcacaggtgcacatgtcgggcggcgacatgaccgagctggcatccatggccaagctcaaggccggccgcttgtgccgtgaggtgaccgattcctgcctgcagtactggggcggcatgggcttcacctgggacaaccgtgtatcgcgcgcctggcgggacctgcggctgatctccattggcgggggagccgacgagatcatgctgacgatcatctgcaagcacatggggatcctgccgaaacgggcggcctgatcaacggagagtcacatgcgctttgacacactgcttgtcgccaaccgcggagaaatcgcactgcgggtcctgcgcagcgcgcgcaagctcggcttgcgcacggtcgccgtctattcggacgccgatgcccgcagcctccacgtgcgcgaggccgatctggccgtgcgcattggaccggccgaggctgcccgcagctatcggcatgcccatgcgctgatcgaggcatgccggcgcaccggagcccaggcgatacatccgggctatggattcctgtctgagaacgcggagttcgcgcaggcggtcgccgatgcggaaattaccttcgtagggccctctgcagacgtcattgcgttgatgggaaacaaggcccaggcaaagctcgccatgcagaaagccggcgtgccgactgtgccaggagaacagggctgcgcgaccgacgaggaggcaatcgctgcggtcgagcgcatcggcttcccggtcatcctgaaggcggcggcaggcgggggcggccgcggcatgcgggtcgtgcgcgatgcctcgaccttgctggcggcgctgcgacaggcgcgctccgaggcggcaggcgcattcggctctgacgagatcatcatcgagcgcgccatcgaacggggacgacacatcgagatccaggtgctgtgcgatgaacatggtcgctgcttgcacctcggtgagcgcgactgttcgacacagcggcgcttccagaagctcatcgaggaagccccttcgcccgcggtgaacgccgagctgcgccgcgcgatgggagaggtcgctgtgcgcgcctgcgaggccatcgggtacacgggcgccggcacgctcgaattcctgcttgacggaaaaggacgcttctatttcatggagatgaacacgcggctccaggttgagcacggcgtgacagaactggtcacggggctggacctggtggagcagcaactgcgcattgcccagggtgagcggctcgcgttcgggcaggaggatgtacgcatgcgcggccatgccatcgaggtgcggctgtgtgcggaggaccctgcggcgggctttctgcctcaggtgggccgcgtcgacgtctggcggccgtcgcccgacatccgcgttgatagcgcgctgcaggacggcatggagatcggttccgactacgactccatggtcgggaagatcatgtcctggggcgagacgcgcgaggaaagcatcaaccgcctggtccgggcctgcgagcgcacggcgctgctgggcgtccgaacgaaccttggcctgctcgcccgctgtctgcgtcattcacgcttcgtgaccggtgaagtcactaccgacttcctggcgggcgaagacatgggcggcccggcctggcgagcacagccgtcggtgcatgcacgcgccgcggcggccttgctgctgtcaggcgcagtcggccgcgagtcatctggcattcgccggctgccggctggcccggcgcagacgcgggcgttgtggctcgtggacgcgacccatgcgctcaacgcgggcgccgccgcgcaagggacggccagcgcagtcgaactgcggccgtccgatgacgggggcgaagttctcatcagcttccgggctggcgcagcggtgcccgcgcgcgacgggaagcgttccgaagcgtgtgacgacgagcctgtctgcagcgtcggcaatgtgcactgggcgccgatcgccggctcagcccggggacatggcggcacgctcgggttggccgtcgatggcgtgtaccgccagctgctgtgcgactcgcctcggcgcgacgaatggtggctgcaggatggcgcggataccttcgtgttcaggcggctggcgcgcttcgaggccagcgacggcgaggcgcggggaggcagcgtgcgggcgccgatgagcgggcgcgtgatcgccgtcatggtgggtgagggcgacgccgtcgagcgaggccagaccctggccgtcatggagtccatgaagatggaaatgcccctggccgcgccaagcacgggacgcattgcgcgcctgcttgtccaggagggcatgcagctcaatgccggccaggtgctgatcgaagtcggcacgggcgccgaggagggtgccatccaagcccaggaggcgacctgactgcacggaagccgaaacgcagatcggacccgcggggcacgaccacaagcacgtccgcacacactacaggagagcatgaatgggccaaaacgcaaagtccggccgcgcggttgtcattggcggcgcatcgggattctggggcgactcgcagattgccgtcccgcaattgctgcaggagccggaactgggctacctcgtcttcgactacctggccgagaccaccatggcgatccttcagcgagcgcgccttcgggcgccggagctgggttatgcaacggattttgtcagcgcggcgctgaggcccaacctgcgggctctgaagcagcatggggtgcgcctggtgtccaacgcaggcggccttaacccggcaggctgccgcgatgccatccttgccttggcgcgagagcaagggctggagctgaaggtggcgatcgtatccggcgacgacgtgctggcacttcaggggagattcctgccttggcccggtgacgaggccgatgccagcctcccgcggttgatgtcggccaatgcctacctcggtgccctgcccattgccgaggcactggacggcggcgcggacattgtcgtcaccggccgttgcgtggatagtgccgcgctgcttggcattgccatccacgagttcggatggtcgatgcaggactacgaccggctggcgcagggcagccttgcaggccacctggtggagtgcggggcgcaggccacgggcgggctgttcacggactgggagcgcgtaccggactggaccaacattggctacccgctggtgcgcatgacagccgacggcgtattcgagctctaccagccgtgtgacgcgggcggactggtgacgcgccagaccgtgggcgagcagctgctctacgagatcggtgatccgcaggcctatgcgctgcctgatgtggtctgcgatttctccgaggtccgcatcgaggacctgccgggcttcgaagccagtggcggccgcgtgcgcgtcagtggggcgcggggaagggcgcccggcgattgctacaaggtgacagcgacctaccagcagggctaccagattgcactgatgatggccattcgcggacagcgggcgttggagaaggccgagcgtacggcgcaagcgctgctggcgcgtagccgcggcctgatggccaaggccggccatgccgactacagcgacaccctggtggagttgctaggcgccgaatccatgtacgggccgcatcgtcgcgtacgagacagccgggaggtggtgctgcgcattgctgcccagcacgatgacaagcaagcgttgacgttcttgcagaaggaggcggcgtcagccggcacctccatggggccgggaacgcgcagccactttggcgggcgttcggatatccagagtgtgatccgcacggcctcgttcctgctccccaagcaggaggtgacggtgcaatggaggctggctgacgagccggcgacaacggtggcggtgccggcgtgtggtgtgccctcggagcggccggcaatgacttcgcacacgccccggagaccgcctggggacgagccgcggcaggacgcgcgcggcctcgtgcgtattccgctcggcacactggcggtcgggcgcagcggcgacaaaggcaacgatgccaacatcggattgatggtgcgcgatcctgcgtggctgcctgtggtcagcgcgcaggcgacggcgcagagggtacgcgactactttgcgcatctgattgaaggcccggtgaaacgctacgaactgccggaaatcggcgccttcaactttgtactggaaaaggcactgggtggcggtggttcctgcagcctgcgttccgatccgctgggcaagtgctatgcacagatgctgctggacatggaaatcgaatgtcccgcggaccttctgccagaaacggcggcggggacagcggggacagcgcccacaccttgaccgggcggcagggcactttgcgaccgacaacgaaccaggagacatgagccatgcaagcgacacagcaaccggactaccaagctcagagcaccacgcggcggctcgccaagcgacgatgccgcgtcgccgtgagcgcgctgggtgccatcctgtggggcgctgcagccagcgcccagccaacgtccactcccggcactgatcgcatcgacaagccggtgcgcatcatcgttgcttacggagccggcggggcttcggacagcatcgcgcgtttcgtgggcgacggactctccaggcgtgccggcaagcccgtgatcgtagaaaacaagtccggtgctgacggcaacattgcagccgacgctgcagtccgcgcgtcgaccgatgcttacacgctgctggtgtccggctcatcgacgcacgcggcaaacgccaccatctaccgcaaacttccctatgacccggaagcggacttcacgccgctggccacaatggccagcacacccttcgtgttgctcgtgaatccaaagcgtgttcacgcagcaacgttcaaggagttcctggcatgggccaggaaggagagcaatccgctttcctttgcgagcgccaacgtgggaggccgtatcagcggggagttgttcaagcaacgagcaggcgtcaaggcagtcagcgttccgtacaagaacagcagccaggccatgacggacctgcttggcggccagttcgactactacctgtgcgacatggtcaccgcgctgccgcagatccaggccggaaccgtgcgcgccctggcaatctccagctccgaacgagtgcagtcattacctgatgtgccgacactggcggaaagcggattcccggactttgacgtcagttcgtggatcggcatctggagcgctaacgcgtcgacgccccagcctgtggccaggctgttgtcgcgctggatcgccgatacgctggactcgcccgatggtcgtcatttcctcatcggcaagggcctgattccggccaaggttgccccgatgcatctgcaggagttgcagcggcgcgacaccaagctctggggaaaaatcatcattgacgcgggaatgcagcagccatgaagcccatagcacgttcagcgcggcgagatcaggcggctgatgcccagtgcgctctcgctaagcttgtcggtgcgcgcatagagccggtagctgatggtcggcagcgctggcatgccggcgtgagggtccaggaccttcaggtcaggggccagcatctccacggtgcgaggcgtgacccccatgcccgctcgcaatgccgcccggatacccgccagcgtcgaggtttggaaagcgacacgccaggggatgttcgcgtccgacagggacttgattgccatgctatgaaacggacaggccccctcgatgagcacgagcggtaccggcgcgccgggctgatggtggtatcgcgcgcctgcgatccaggttacgggagaggtgcgcagcacgacctgatcgaactccgggttgggcacagggtcaagcatgacgaccaggtcaatctcgccgcggcgcagggacgaggtcagccaacggcggcggccaacctggatgtccacgcgcaggccgggaaaaacctctgcacacatcttcaggtattcgggaatgagcgagtcgacggcatccgcgcaagctccgactttcaccggttcgtcgaaggctctctgggtcatggcgcgataagcctcatcgttcaggccgacgatgcgacgcgcgtagtccaggagcctggtgcccgccgtggtcaggcgtttgctgcgtccaacgcgctcgaacaacacgcagtcgagcgcggtctccagcttttgcatctgctgcgacacggccgcctgggtgcggaagacctgctctgccgccacagcgaagttttctttctctgccacggcaacgaacgtgcgaagcaggccgatgtcaaggttgcgaaagctcatgtcgaatagcgttgcggctgccgcttgcaagttgtcgtgattcccaacattaacattcaggattgaacagcgtgacttccagcgtatcctccacacctatcgaagctacagggccgtctgtcatcacggacgcaccgttcgttcgcaccgtcgttcacggagccgtttttcgcatcgagcttaaccgatccgatgcgaggaatccactgggcgccgacatggttgcggccttgtcaaaggcggttgatcaggccgagcaaatggatgacgtgcggatcatcctcttcaccgcagcgggaaaggccttcagtgctggtggggatctcggcaatatctcggaccgcctggcggtcaagcccggcgcggatggccaggatcccatcgcggtgggtaaccggcgctatggcgagttccttgcccggctcatccggtcgtcgaaggtcacggtggcctgtgtgcacggcgcagccatgggcggaggcgcgggccttgtatgcgcggtggatatcgccatcggttcacccgcggcccggttcggctttccagaggccggtattggcctggtgcccgggcaaatcctgcctttcgtcagcgcacgcattggcgttcaagtagcgcgccgcctcatgctcaccggtgaacggatcgatggcgcggaggcccaccgtctcgggttgctggattaccttgccgaatccgaggaggcgttgcctgcgcgcgtgcgggaaattctggggtccgtcgttgccacggcacccgcagccagcgctgcaaccaagtgccttctgacgcagatgcgcccactttcggcacagtcgcacgaggcattgacgcactacctggacactgcctccgtcaagtttgcgcagcagatgcgctccgaagcggtggaaggcgtgacagccgcccgggagcgcaggccggcgctctggaacgtgggggccgaactgccgccgcttgcggcgaactgaaccacacgcgtcgaacgtcaacttttcggaggttggaaatcatggcatcgctggaaggcttgaaggtcgtggatctgtcccgcgtacttggtggtcccctgtgtgcgcagatcctcggggatcacggtgccaacgtgatcaaggtggaaggtccgatgggcgatgagacgcgcacctgggggccgccctttaatgaggctggcatggcttcgtacttcgcgggcatcaatcgcaacaagcgcactgtgtgcctcgacctcgcgttgccgcaaggacgcgaagtactgatgcagctgctcaccgaagcggacgtgcttatcgagaacttcaaggtcggcaccctggagcgttgggggatggggtacgacgacgtgctctccttgcgctttccaaggctgatccattgtcgtgtcacgggcttcggtgcgacggggccgctcggtgggctgcccggctacgacgccgcggtacaggcgctcggtggcatcatgagcatcaacggtgacccggatggaacggccacgcgcgttggggtgccgatcgtcgatgtgacgactggtctgagcgccgtgatcggggtgttgttggccttgcatgagcgtgagcgcagcggtaaaggacagtccattgagtcggcactgtatgacaacgctctgttctccctatacccacactccatcaacacgctcttcaccgccaaggctccgatgcggtctggcaatggccatccgaacatcgcgccctacgacacctatgccactgccaccgagcccatctatctcgcggtcggcaacaatggccagtttcagcggctgtgcgaagcggtggaccgaacggaactggcggtcgatgcgcgctacgcaaccaatgctcagcgagccgtgcatcgtttcgagctcaagcgcgatcttgaggccgccttcagccgcttcgaagcgcagtcgctgttcgaacgcctggtggcagttggcgtgccgtgcggtgtcatccacaacgtggtcgaggcgctgaaccacccgcacacggcacaccggggcatggtggctgaaattggaaaattcaagtcggtcgcttcgccggtcaagcttagccgcacgccggcaacgtaccgtgaagctccgcaagagatcggcgcgaacacggtggaggtgctgcgcgaggcgggccttacggaatcacagatcgaaaagctgctcgagcagggggtggcgcttcagcgcaagcgcactccgtaaggtgcaaccccgacagcggagccgcacactggcgacatcatggccgcactgaaatccggccatcggtcggagcgatttttttgctgttgactgctgcagcggcctcggcaataccgctccgctcacggcaaaaaaatcccccgaggctgttacttgggggaggtgctggtctgtggccggagacgctgagtcccggccacgaattttttgaggggacactcttttctgtagttccttacatgctgtggtcaacgagtccatcgcggttggtgattctcgcgccatcggtgtacacgtcgcgcctatccgagactttcgccccgtctgaatagacgtcaaactttgtggtcttgcccccatcggaatatgggtctcgcggccccatcacgctggcgccgtcagtgtagacatcccgcgtcccgatgccggcataggcgattccggcactaagcgccgcacccgccgcagcgagcagtatgactgtctttaccatttttcttacctccatttcaggtcgttgcaaaaacaccgaaacgattcttctttcgcttcagtttgagggtcgcaacttcgcacaagtgcaatgaaatgtaggccttggcgacaagcatatgaatcgggcttttttccgaaaagaggctaggggattgccctagccggtgggcaggcagattcagtcctgcattactgcacggtggcgatcgaatccatccggcaactcttaccgcgcaagggagttctggcgtagattcatagtagtgttgtggcaccatggttttgcagcgcttcgccttgcatcgattcggtgcaggctcgtgatttgccgcaggtgcatggaacattcactttcgcaagagtgtcgtcattccgtttaaccacagaaatgactggatgtgacagtgtcggttcccgggggtttgaagcgaaccatgtttattgtcccgcgcaacttaaggctcagacttttcgtccataccggacttgtcgctttggcgtatttcgcaagtgcaaagctgggactggcttatgcagtagtgggcggtgcggtgtctctggtgtggcctgccagcggcgtggccctggttgcgctccttgtcatgggtttcgcagctgccccgggaattgccattggctccttttttgccaatatgtcggtcggcgtgccactgccaatggccgcgctgattggcttcggcgcgacggctgcagccttgactgccacgttgctgttgacgcgcgtggcccggttccggattaccctcgaccgcgtcagggacgtattggccttcatcatcctggccgcgacagtcagcacagcagtgagtgccctgattggtgcgactgctctccttggcgggggccgggtgtcggcttccgagtacggcaaagcagtcctggaatggtggctcggtgacatgatgggggtgctggtagtggctccgcccctgctcagcctgcttgcgagtcctggccctgtgcactccacaaagcaggccgtggaagcgtgcggactgaccgttgccatgctctgggcaagttacctcatcttcggcgctcccgagcttgccgggcacggctactacccttcagccctggcgattcttccgttcatcatctgggcggctctgcgtttcgatcaccttggcaccaccttcgcaaccttgctggtctcgatcgttgccatctggggcaccaccaacggcaccggtccctttgccgcagtgtctccagtggatagccttgtgagatggtgcgccttcgcgaacgtcgtggcagtcaccgggctgctgctggtggcggcacatgcccaggagaagcgcgtccatagcctgctgcaggcatcccacatcgaactggaggggcgcgtgcgggagcgaacccgggacctgcagcgggcaaaccatgaactgaagcaggagatggcgcggcgtcgcctgctggaagcggagctgatccggatcggcgaccagcagcagagactcatcggccgggagctgcatgacggcctcgggcagcacctcaccagcctgggcttctactgcacgagcctgaatcaaacgctgcagaagcatggccacccggctgcggcggacgcggctaccatcgtcggactggtgaagcaggcgtccttgatgactcgcaagattgcccacggcctggacccggtcgccatggaatccggtggccttgcgctcgccctgcagaggctggcgcagacgacctgcgcgctggatggcattgactgcacgctgcgcatcggctcggacgtggacttgctcgatccgccgatgcagatcaacctttatcgtgcggcgcaggaagccgtgaacaacgcgctgaaatacagccagggacaccacatcgggatcgaccttgagcgcgaaggcgggatgcagcggctttccatcagtgacgacggggtgggggtggacccggagcaaatggagcgtgcctcgggactgggacttcacaacctgcgtcaccgggcgagcctcctgggcggctcctgcacgatcacccgcaatgctctgggcggcaccacggttgccatcagctatccgataccagagagtccgggccatgcaacagaagccatctagcccgggccgcgcaacccagatcctgatcgtggatgaccaccccatcatccgcgaggggttaagccaaatgctgaatctgcatgaggacctgcacgtctgctgtgcggccggcagtgccgaagaggctctggcgttgatggcctgccagcctgacgtggccgttgtcgacctcagcctgcactcgaactccggcctggatcttgtcaggatgctgcggcaacactatccaaggctggcaatccttgtcctcagcatgcatgacgaaacgctgtttgccgaacgcgcactgcgcgcaggcgccaacgggtatctgatgaaactcgaggccacggagcatattgtgaatgccatccgcgaggtgctggcaggcaatgtctacctgagcgccgccatgcatgacaagctggcgcgggccctgaaggctcctcaaagaagccgcgcgggctcgatcgcaagcttgtcggaacgggagttcgaagtcctgcacctgatcgggcttggcttcagcacccgccagatcgccgggaaactgaatcgcagcgtcaagaccatcgaggcgcatcaggccaacatcaaggaaaagctggacatccccaacggcaaggagttgatgcgcttcgcgattcagtggatcgagagccaataggggttgagttgctttcgcctgcttgaacgctcgactgctcgcggccctgggccggacggaagcctggtagcgcgtgtcaagggcggggaacgtcccacataagctgcgttcagatctgaagtgaagatcgatttagctggcccgggcccgcaccgcagtccgcttctggtgccgcagcgaatctcgttagtctcttttttcccccgaacggggcgttccgcccatggcggaatttgcatacactcgcccactccgtggaccaacggccagcacaggcggtccatcgtgatctgtgggccgtcggtggggattccacagggggcggcgcgggcccggggtttgggcgcttctgtccctttccggtcgttcaaccggtagattcgaatacacgcctggcggcccggacgccggaaaacaacctgctgcgtttacttcccaaactcactgaacctggccgccaggaattccacgaacagccggatccgggacgacagctggtgccgctgctggtagacggcatagatgtccgcctcgggcgtcgcgtattgcggcagtacctgcaccaggcggccactgcgcaggaaccgctcgatgtcccactcggcgcgcatcaggatgccgtggccttgcagcgcccagttgaccgcgatctcgccgtcattggtggtgaggttgccgcgcacatggaccgattcggtccgcgccttggtccctttgcctgaggtcaggcgccacacgccataggcgtcgctgccctggcggatgccgatgcagttgtgctggcgcaggtcggcgggcgtgtgcggggtgccgtggctgcgcaggtacttgggcgaggcgcacagcaggcgccggttcggcgccagcttccgggccacgatgcgggcgtcgggcggctggccgaagcggacgcagacgtcgaaggcatcttcggtcagcggcggcgggtcggcggacagctggagctggacatcgacctcggggtaggtggcgacatactcggaaatcaccggcgccacatgcatgcgcccgaaccccagcgtggcattgacccgcagcaggccgctcggccggccctttgagcgggtcaggatctggtccaggtcgtcgatctcgctgaggatgcgccgcgcgtgctccaggtagacctcgccctccggcgtcaggctcatgcgccgcgtggtgcgcgtcaccagcggcatgccgatgcgcgcttccatctgcgccagccgcttgctgaccgcggcggtagtgatcccaaggtcgcgcgcggccgcgctcaggctgcctgccgtggccaccgacgtgaagaatcccagttctgacggttggatgccggacgatagcgccattccatctttaatttcaggttaacaatggtttaactctacaagcgatccaaaaccttgtccacggcccagaatccgccccatgcactcaactcgtatttgaatcgatctggaccaggagacacggatgaagacgtaccgcattgcaacgatccccggcgatggcattggcaaggaggtggtgccggccggccgtgaagtgatggaggcgctggcggctgccggtgctgacttccgctttgagttcgaagacttcgactggggtggcgactactatcgccagcacggcgtgatgatgcccgccgacggcctggatgcgctgcgcgacaaggatgccatcctgttcggctccgccggcgacccgcatattcccgatcacatcacgctctggggcctgcgcctgaagatctgccagggcttcgaccagtacgccaacgtgcgcccgacgcgcatcctgcccggcatcgatgcgccgctcaagcgctgcgccgcggaagacctgaactgggtgatcgtgcgcgagaactcggaaggcgagtattcgggcgtgggcggccgcgtgcaccagggccacccgatcgaggcggccaccgacgtcagcatgatgacccgcgtaggggtggagcgcatcctgcgctttgccttcaagctggcccagtcgcgtccgcgcaagctgctgacggtgatcaccaaatccaacgcgcagcgtcacgccatggtgatgtgggatgaggtggccgtgcaggtagccagggacttcccggacgttacctgggacaaggaactcgtcgatgcggccacggcgcgcatggtgaaccgtccggcctcgctggacaccatcgtcgccaccaacctgcatgccgacatcctgagcgacctggcggcggcgctggctggcagcctgggcatcgccccgaccggcaatatcgatccggagcgccgctacccgtcgatgttcgagcccatccacggctcggccttcgacatcatgggcaagggcctggccaacccggtcggcaccttctggtcggtggtcatgctgctggaacacctgggcgaaaacgaggcggcgcagcgcgtgatgcaggccgtcgaagccgtcaccgccaaccccgcgctgcacaccggcgacctgggcggcaaggcgactaccgctgaagtgaccagggcggtgtgcgacctgcttgccgctggccagcaagcgaaggccgcctgagcgcaagggccgtttcgtgagcctgcaattttccgagcccaacgtgttgctgcggcgcatgttcgatgcggcggtcgcagccggccagccggccaggaccctggcgcggcacctgccgccgccgccgcgcggacgcaccgtcgtcattggcgcgggcaaggcctcggcggcgatggcgagcgcgctggaagcggcatggcccgggccgcttgaaggcctggtggttacccgctacggctatgcggtgccgtgctcgcgcatcgagatcgtggaggccgctcaccccgtgccggacgatgccgggctggccgcttcgcagcgcatgctggcgatggtggcgggcctggccgaggacgacctggtgatctgcctggtctccggcggcggatcgtcgctgctgccgctgccgcttgccggcattacgctcgacgacaagcagcgcgtcaatcgcgcgctgctgaagtccggcgccacgatttcggagatgaattgcgtgcgccggcacctgtccgccatcaagggcggccggctggcagccgcatgctatccggcgcgcgtgctgaacctgctggtttccgatgtgccgggcgatgaccccatcgatatcgcctctggcccgaccgtgcctgacccgaccacgcgcgccgatgcgctggccatcgtcaagcagtatgcgatcgaccttccgcccaatgtgatggcagtgctggcgtccgacgcggccgagacgctcaagtccggcgccccgcgcctgccgcgcatccgcaccgagttcatcgccacgccccggctggcgctggaagcggcggcgcaggtgggccgcgacgcaggcttcgccgtgcacgtgctgggcgacgccatcgaaggtgaggcccgcgatgtcggcaaggtcatgggcggtatcgcgctggcagccgccaggcatggccagctgtttgcggcaccgtgcgtgctgctgtccggcggcgagaccacggtcacagtgcggggcgcgggcaggggcggcaggaacgtggagttactgctgtcgctgtcgctgacgctgcgcggcgaacccggcattcatgcgattgcgggcgacaccgacggcgtcgacggccaggaagagatcgcgggtgccgtgatcggccccgacacgctggaacgtgcctggcgcgccggactgcgtccgcaggatgcgctggccgccaacgacggccatggatttttcgaggcgctgggggatgccgtcatcaccggccccacgctgaccaacgtcaacgactttcgcgcgatcttgctgacgcgcgcctctggagcctgcggtgctctgccatgaagtggtggatgtgctggagatgaccaacctggccagccacaccgtgctgaaggagcagttcggcgtggccggcagcagatcgtcatctcggccggcctgccgttcaccgtggccggcaccgccaacctgctgcgcatcgcgcaggtccagcaggcagacatcagggggccaaggcgctatcaagcactaatcagccgaagaccggctgcaaacatagaacattcaggagacaaagcatgcgtggtactgaactcgtgcgtcgtatttccggcgtggccgtgctggcagccggctttatcctcagcggcacttgcctggcacaggaatggccggccaagccgatcaccgtggtggtgccgttcccgtcgggcgggactaccgacgtgctggcccgcgcgctgggcgaccagttgtcgaagagcctgggccagcccgtgatcgtcgagaaccggcccggcgccggcgccaccgtgggcgcggactacgtcgccaagggcaagccggacggctacaccctgctgatgggcgcggtccaccatacgattgccagcagcgtctacaagaagctgccctacagcttccagaaggacctggcacccattgccacggtcgccatggtgcccaacgtgctggtcatcaatgccgccaagacgccggcgaaggacgtcagcgaactggtggccctggcgaagaaggcagcgccggagtttgcctatggctccaatggcaacggcaccgcgcagcacctgatcggcacccagttccaggccgccacgggtgcgccgctgctgcacgtgccctacaagggcagtggcccgctgaccaccgatctgctcggcggacaggtgacgatgtcgttcgataccctgacgccggtgctgcagcacatcaagtcgggcaagctgcgcgccctggccgtgaccaccgcgcggcgctccagcgtcctgcctgatgtgccgacgctggaagaggcggggctgaagggcttcgatatcggcacctggttcggcgtgctggcgccggccgccacgccagcgcccatcgtcacccggctgaacgccgagatcgtcaagatcgtgaaatcgccggacttccagcagcgcatggtggcggtcggggccgagccgatggcgagcacgccgcaggagtttgccaagcggatccaggacgagacggtcaagttcgccaggctggtgaaggacgggaaggtgacgatcgagtaggcgacccgccgtcactcggttgcttgccttctcgcctatattgaactctgcccggcatcgccttatgcgttgcacgggcggactgcgggtaacggagggagggcgccatgaagatcgcgagcatcgaagccatcgtcctgcgcattccgttcacggtgggcggcgtctccgccgcgggcgtctggggcggcgccgggatgcaggccgccgactcgctgctgctcaaggtgacgaccgacgatgggctggttggctggggcgagaccttcggcttcgtggggattccggcggtcaaggcggccatcgaacagatgctggcgccggcctgcctcggccgggacgcaacccggatcgatgccatcggcctggacctgcaacgcaggttccatgtcttcgggcgcagcggggccatcttctacgggctgtccgcgctcgatatcgccctgtgggacctttgcggcaaagcggccgggctgcctgttcaccaactgctcggcggcgcgcgccgggaccgcctgcctgcctatgccagcctgatccggtatgccgatcccgaaacgatggcggtcaatgtcagccgcgccatcgccgatggctaccggagcctgaagctgcacgaggtcgacctcgcggtcatccgcgccgcccgcaaagcagcgggcccggacatcgagatcacgctggatacgaactgcccgtggccgctccatgaggccatcgacatggcgcgcgcgctggaacccttgtcgctacggtggctggaagagcccctgtggccgccggagaactatgccggactggccgccctgcgccagcagtgcgccatcccggtcgccgccggcgagaatgccaccacgctgatggagttccagcacctgctcagcgtgggcgccgtcgatgtggtgcaacccagcccggccaagatgggtggcatcagcgccttgcgcaacgtctttgcgctggccgaggcgcacaacacgcaagtgatggtccataccttctacgacggcccggggctgctggccagcatgcatgccacggcagcgctgggggatgccgcggccatgatcgaatggcgctacttcgacatggaggcgcaggtgcttggcgatgccgtggtgccgcgcgatggcatgatcgcggtacccgctggcccgggcctgggcatcgacccggatccggaggtcattcggcgatatcgcgttgcgtgagcattatcccggcatcagaaatccaccttctcccccggctgcggcacgatcacgcctgccgcggcgccagcgcccagcgccgccttgaacgcttccggtgtcccgctcaactgcggcgaggtctgatagtggatcgggatcgcaaagcgcggccggatcaggtcgcgcaccgcgatggcggcttcctgcggtcccatggtgaaatggccgccaatggggatcagcacgagatcgggtttgtagacctccccgatcagccgcatgtcaccgaacagtcccgtatcgcccatgtgccagatcttgaagccgttctccagctcgatgatgtagccgacgggctcaccgccgtagtgggtttcgtccttgccggtggcggggttcttcagcgccagttccgacgagtgttcggcatgcactgcggtgattctggggccggtcgggccaaagggcatgaccgtgccgctcttgccgaagcgctgcgcctgcgcggccgggaccatgcccaggctgaccagggcctggcccaggccgccgccgttgtagatcggcgcgttggtcagcctggccagggcgggggcatcgcccaggtggtcgctgtgggcgtgcgtgaccagaatcaggtcgaccttgcccagcgccgagagctgcttgaagcctggcggcgtcttgggattggtggtgagccatgggtcgaccacgatgaccttgccgccgggcgtggtgatgcgcgtggcggcctggcccagccacagcacttcggccttgccggcggtgggctggccggccggcatcgggcgccgggcctccgctggcggcgtgggcgccgcgcaggcgccgagcagggcgatgacggtggcgaggagaacggcgcgcagtctggtcatggtctttcttccctggatgaattggcctggcaacttgcagtactagcggacaaacatgcccaatccttcgtggtcgtaatactccagccacacgcggtcgctggagaacgccgcttgcgagatcgtgcccggcgtcgcgttctcgttattgagcgtgaaggtaaagacgtcgccgtcccagtggctcagcggcaaggtgagaggggtggcgcccagcgtcatcaccagcgtgccgccctggtcggccacctgcagcggaccgtagtagtcgttctggtagatgccggtgtaagccgagagtgcgcgcgccggcagcgggttggccgggggtgcctggccgaccagccggccttccggtgccagcagcggcgcaagcgcatcgccatagatcttgccccagtcgcgccggatggcgccgtactgcacgagatcgaagaattgtgcgttcagggtttccgggacgccgatgggatagccgttggtcaacgtgacgatggccaggttcagcgacggcaccgcggtaaggttggtggccgcgcccaccgcgaacgcgccggagtggttataggaggccagcccgagttcggtcgtgccgacattgaagccatagccgtagtagccggccggccgtccgctgacgggcgggctgctttgcatctgctggctcagcgcgggtgccagcgcggcggcgtcgacgatgcgctggcctgcgaactcgcctttggcgagcagcatcgccagccatttcgcgatgtcgttgacggatgagctgacgcccccggcgggcgactgcgcatccggcatcgtgcccatgccttgcacccaggcgccgttgatcctgacatggccgagggcgcggttgtcgcgcgcggcaaagtcggcgtagcgcgaactggtgcgcgccatgcccagcggttggtagatggcctgctcggacagcgtggcccagtcgatgccggccgcggtggccacggcctcggcggcggcggtcatgccaaagttggtgtacgcatagaccgcccggaacggatgcagcggcaggtagcgcaggcgcgtcagcacctgctggcggtcgaagcccatgtcttcaagccggtcgccggcgtggtcgggcaggccggagcgatgggcgtagagatcgccaatggtgacggcttccgtgacttccgcttccgcgagcgcgaaccacggcaggtgcgcgcgcaccggcgtatcccaactgatgccgccgcggccgacctgccgggccaccacggttgccccgatgggctttgacaccgacgcaagctggaacacagtgtcggcatcgaccggcgcggggtcggttaccagcctgcggccaaagcctttggcgtaaacggtttgattgccgcgcaccacggcgacggccatgcccggcacgccggaactggccatcaggtcagcggccagcttgtcgatctgggcgatggcctgggtgatctgggattcgggaaccggaccgggcggcctgggcggatcgtcgtcatccccaccgcaggcgggcagggcagggaccagcaggccgcccagcgcggctcccaggaaacggcgacgctcttgcagtttgcccacggtggttctccgcagttcttaggtcaggcgggtcggccgcgcccttggataggaatactgtaggcgatgggggcggggagtggcgaatgcgaaacgtcttatcgccgcacgatggcgggggcgagaaactgcaggcctcaccgaagggttcggtgagcgggggtgacaacccgaaagaacctcggcagattcgatctcattcaatcaagagtcgcgcgggcaaccatgtttccatggcgggccgggcggggcagctgcaaggctggccgggtcttcttctgctgaggttccccggtatgtcacccccgttgtcaggcccgccaccttcttctcgtctgggcaggcgggctctctctggctagtaggagataagcgcgatgcaaatgtctacccatcacccttcaggaccccggcatatcgtgccggccggcacgatcgagtcctttgagcaaatcagcgccgggctgagtgccatcctgttgctggttgaaatcgagagcgagcgttcggagggttgccacaacgtgtattcgctgctggcaatggtgaaggcgcagctggaccagacggcggcaaagctgtgcgcggatgaatgacgagtccgtcgcggcaaaacaaaaagcccgcacgttcgtgcgggcttttcgctttgaaaccttggtgcccaggagaggactcgaacctccacagtgttgccaccgctaggacctgaacctagtgcgtctaccaattccgccacctgggcaaggtgagcgccggattttacagcgcgctgcggattttgcaagtccctcggccggctttggcgcaagaaatccggttgagctgcggtgggccgctgctgctggtcaatcggtggacacgtcagcgtcggaagtgaggatgtcaaacagcgccttggccgcaggctgcaacgcccggtcgcgacggcgtatcagcgccaggacaaggtccgcggcaggctcggtcagcgcgatggcgcacatgcggggatgatcgcgtggcagtgccaggcccggcagcacggccatgccgaggcgggcttccaccagcgccagcacgccaaccacgtggttggcttccccagccggctggcacgcggcgagaccttcgatgtggtgatcctggcggactcgggtctcgacaagctgatatcggagggcaaggtggcagcgggcagccgggtgccagccgaactgcagcagcacgtcttcttctccgccgggatggtggcgggccaccagagcgcggcggcttcgcggtttgttcggttcctggcgtccccggcggcagccacgatcgtgcgaacgaccggactggagccggttgccacgccgctgccgccgccggctccgccggttctggggcagccggaacaacgctgaaccgcttcaatatccgttggcggccgcaaaaaacaaaaagcccgcacttttgtgcgggctttctgcttgaatctctggtgcccaggagaggactcgaacctccacagtgttgccaccgctaggacctgaacctagtgcgtctaccaattccgccacctgggcaaggtgagcggcgcattttaccgaaggttcacaaatttgcaagcacctccggcgggcacacgcagcatcgctggccggactgcgttacggcgatccggatgtgccacgggcaatcagaacgacggcaccatcgcgcccttgtactgggccttcatgaactggcgcacgtcttcagactggtacgctgccaccagcttcttgacccacggcttgtccttgtcctgcgtgcgcacgacgatgatgttggcgtacgggctgtggatgtcttccagtgcgatcgcgtccttggtcggctgcaggccggccgcgagcgcgtagttggtgttgatcacggcggcgctgacatcgggcagggcgcgggccagctgcgctgcatccagttccacgagcttcagcttcttcgggttctcggccacgtccagcggcgtggcgttgacaccgttggtgccggcgcctgccttcagcttgatcacgccttgcgactggagcagcagcagggcgcggttttcattggacgggtcgttgggcacggccaccttggcgccttgcggcaggtccttcggcgacttcaggctcttcgcgtagatgccgagcggcgagatataggtgtagcccacgctctgcatcttgtagccgcgctgcttcacctggctgtccaggtagggctggtgctggaagctgttggcgtccaggtcaccggcatccagtgcggcgttgggctgcacgtagtcgttgaactcgacgaccttgacgttcaggccattgcgcttggccactttctggacgacttgccagacttcggcatccgggccgctgaccgtgccgacgcggatggtctgttcctgggccgacgcgctgccggcggcgaaaaaaccaagggcggacactgcgaccgccaggcgcttgatgagagacgtgctgcgcataggagttctggagatattctggttatgtggcgagtgagacagtcgcctgggcagggatcgcctgaccggggcaagggccacagattaacgcaattgcgtcaagatggcgcggcgggaatgaatctggcgtctatttctttttcataagcttatgaatccaaacaacgccagatggccggcattaaatgcttctgtgccaaggctcagcctgcaaagacttcgcgcaatgtccgcaaggtgtcttccacgatcctgtcactcaggccgccggcccgcctgaccagccgggacttgtccacgatccggagttggtccagcaggatcaggccagtcttgcgctgaaaagtcaccgggacgcgaaacggtgccggcctgctgccggtaatcattggcgccacggtgacggtgcgccactggctcagccggccaccgccccatatccctggcccttccactcgataaagcacaagccatggccgaacgggtccgacagccttgcctgccgtccccagtcaaagtcctgcggccagtcctcgatctcggcgccggcttccagcgcgcgttcgatggcctgttccaggttggccacgacgaagtcgaggtggaccggcgtccagtggcggcggtagtcgcgccgggtatcggcgcgggtggtggggcgggtgccggcgggcttggcgagcaggtagatgggggtgttgccgcccagcatttcggcaacggtgccgtcgaacagcttgcggttcagcctcaggccaagcccctgcgcgtagaagtcgatgccacgcggcaaatcgtcgacatcgatattgatcagcaactccatgacagcctcctggcggcgttccgtgtgaaagcggccgcattgtgcgccgggtctcctgacaactgctgtcaggagtgatgtttcagccggccagccaggtgccaggaacggcgcgctagccgcgcaacagctcccgcaccaccgggcgcagcgcgtcgccgagtgccaggtgcgcgtcggcatccaggtgcacgccgtcgacctcgctgctctggatcacggtgccggcgtcgaacagcggacagcccagttgcgtgcagacctcggccacggcttgcggcaggcccgtccacttatgttcgccgccagcaaacttgggcgccagcggcccgcgcggagtgcggatcgggggtggggtgacgaccagcaccggaggcaccggcatgcccggctcgatcggcgcgctgcggatcgcctgcaccagcgtggcgatgccctgggcggcgtgccaggcgttgtgcgggtgcatcgactggaaatcgttgttgcccagcatcaggaccaccagcgccagcggcgagtggatttcaacgcgctgcgccagcccgtgcaggccgttgcggccgggtttgaatgggtcgtcccagaccgtgcggcggccgttcaggcagtcttcgatgacgcgcaccggggcgccgccgtcggcgttcaggcccagttccagccggccgggccagcgcaccgggaagggcaggcgccggcgcgtgccgggcacgatgccccatgacagcgagtcggcgtagacaaggatctgcagaggatcggtttcggccagcggcgcggcagtcatgcgggactccagttggcgtggatattggtcgataaagggcaatggtccgtgtcaagccatgttgcaccgcgcagacaaaaaggtctcccgaatacgcggagacttcataatatcgacttactgacgatctggagaatgaagttgcgtttcgagcacttggttgagatcaacgatccaggcaatcctcaactggatccgctgacgcctgaccagctgtggcaagggctggtgctgcgcgccgagtcgcccgaactcttcgtgctggggctggaccgcgccgaagtagtcggccgcggcgacaactggatcgatcgcgtgctgcattttggcgaggcgtcgatccatgaccatgtggtgttcgagccgcgccggcaggtgcgctatgaaaccgcggccacggccgagcatgccggcggcacgctgaccatggcgatcgagaccccgggcccgggcgcgctgctgctgcgctttgtctacaacaccaccatgccggcggtcgacgccagcggcgatgaccgctatgccgagatcgtcaagtccgcctaccacgaggccgatatcgacaccgtgcgcaagatccgcgagatcgctgacaccggacggctggggtgagcgagggtcccgccacgccggagggttccggccagcggccgggtctgccgacccggctggcgctgcgtgtgcgctacggcgagcggctgcgctggctggtgctggtgacgctgatgctgggcacgatctcgtcgatcgtctcgtccaccatcatcaacgtagcgattccggacctgagccggcatttcgtgctggggcaggagcgggcgcaatgggtggcggccagcttcatgattgcgatgacgctgtcgatgctgctgacgccctggctgctgaaccgctacgggctgcgccgcaccttcctgggggcctcgctgctgctgggcgcgggcgggctctttggcggcttttcaccgacctacggcgtgatgatcgcgatgcgcgtggccgaaggcgtcgccgcaggcattatgcagccgctgcccaatatcctgatcctgcgcgtgttcgaagagcgcgagcagggcaaggcgatcagcatgttcggctttggcgtggtactggcgccggcgctggggcccagcctgggtggcttcctggtcgaggccttcggctggcgctcgatcttcttcgtggtggtgccgctgacgctgatcggcgtgctgatggcgcggcgcttcatggcggtggactcgatcatgatgggcgagcgccagccgctggactggcgcgggctgggcctggccggtattgccacggtaagcctgctcaacggcgtggtcgagatgcgcgacagcgtgcccgcgggcctggcgctgtcgggcttcggcgtgctgatgctggcggcgttcgtgctgtggcagctgcgcgcggcgcatccgctgatgaacctgcggctctacagctaccggcagttcgcggccggggcggtggtggcctttatctacggcgcggggctgttcggctcgacctacctgctgccggtctatatgcagatggcgctggaatacacgccgtcgcgcgcgggcctggtgctgttcccggcgggcgtgatgctggcgctgacgatcgccatatcggggcgcttcacccacaagatcgcgccgcatatccaggtgtcgttcgggctggcgctgctgtcgctgtcgttcctgctgatggcgctgggctcgcgctccacgccatatctggtgctggtggcgctggcggtgctggggcggatcgggctgggctgcatcctgccgtcgctgacgctgggggcaatgcggggggtggacttcacgctgatcgcgcagggctcgagctgcatcaacttcctgcgccagctgggcggcgccatcggcgtgagcctggcgggcgtgggcctgcaatggcggctggcggagcacggcgcggtgctgggccaggccggcgacgccgccgtgcaggcggcgcgcatccgtgccttcgatgaaaccttcctggccgtgggcgtggtgattgccagtgcgatgatcgcggcgtggcggatccggccgcggccggtgccggcggcctgaggccgccgggcctggctgcgccggcttagctggctgcgccgctgcgcagttcttccaccagcgcgatgtactgctccatcgcctgttcgcgtgcggtgccgcgcagggcttcccaggcttcaaacttgtagcggccgacaaagtcggtcatgccgggcttgtcgccgtgggcatcgccttcgctgccttgcttgaacagggcgtacaggcgcagcagggacatgttgctggggcgctcgctcagttgcttgacgtcgatctgggcctggtcgaagcgtgcctgcaggtcgctcatgggggttcctccgtgtgtgctgtctggattgcgaaagtgcaggccgatgatagccgcccggcggcgccgcgccgtccgtataaaaccgaagaagccctcgattccgggcgtcaccggatacaatcgcgccatgtcctggattcttgctgttgaaacttctacagagtggtgctcggtcgcgctcggacgtgcggtgccgggtgccggagtcgagtgcctggtgcgccatgagcacactggtgcacgctcgtcggcacgcgtgctgccggctgccggcgagctgctggccgaagccggcattgcgctggcggactgcgctgcgattgcctttggcgccggcccgggctcgttcacgggcctgcgcaccgcctgcggcgtggcgcaggggctggccttcggcgccgggctgccggtggttccggtcaataccctgatgacgtgcgccgagcgcgcgcgcgccgctactccggcgctgccggacgacaccgcggtgctggtggccctggacgcgcgcatggatgaagcctattccgctgctttccgctggcatgccagcgcgcgggaatgggcggaagtcacgccgatgcaggtcagcgcgccggaaaccgtgccgctgcccgacggcgatttctggctggccggcaatgcctcgacggttttcggcgagcggctggcgggcctggcgcgtgccgcgcgcgtgctgccggaggcgatgccccatgcgcagccgatgatcgcgattgcactgcgcgcactggcgcgcggcgaggccatcgacgccgaccaggccatgccgatctacctgcgcgacaaggtcgcgcagaccatcgccgaacgcgaagccgccgctgccgcccgtgccgcggcccagaccgggagcgcatcgtgagtgcagcctatccgctcgatccccgcaaccactggccggccgtgcccgccatgccggtgctgccgcacggctgggcgctgggccgcatgagcgcgctcgacctggcggccgtggcgggcatcgaggcgcgtgcctacagccatccgtggacccgcggcaatttcgagaactcggtcaagtccgggcatctcggcctgacgctgcgcgacccggctggcacgctggtggcctacgccgtgctgatgccggtggtcgatgaaatgcacctgctcaatatcaccgtcgagccgcggcgccagcgccaggggctggggcggctgatgctggcggtggtgctggccacctcgcacgcgcaccgcatccataccatgctgctggaagtgcggccgtccaataccggggcgatcgcgctgtaccaggcggcggggtttgccgagatcgggcgccgcaagggctattacccggccctgggcagcaagcgcgaggatgcgctggtgctgcgccgcagctggccggccgagtccgccgccaatgaaggcacggagggcagggcatgagccgccgcgcacagttcctggaagtcctgggcatcccgaccgaatgggtgccgcgcgagcgcgcggatgcgcaggcagaggctgcgccggaggtggccgtggcgcaggcagcgatgcctgttgccgaggcgcctgtggccgaggttgccgcagtggttgccgctccggctgcggaacccgccatgccggtgccggcgccagtggcgccgccggtctcccgggcaccggcggcgcctgctctggttccggccggcccggaacccggctcggcgcaagcagatcgcgaagccgccattgccagcatggaatggccggcgctggacgccgccgtggccggctgcaccgcgtgcggcctgtgccagcaccgcaccaataccgtattcggcgtgggcgaccgccaggccgaatggatgctggtgggcgaagcccccggcgagaacgaagacctgcagggcgagcccttcgtgggccaggccggcaagctgctcgacaatatgctcggcgcgctcgggctggcgcgcgggcgcaatgtgtttatcgccaacgtgctcaagtgccgcccgcccggtaaccgcaacccggagcccgaggaggtggcgcagtgcgagccgttcctgcgccgccagatcgcgctggtgaagcccagggtgatcgtggtgctgggccgctttgcggcgcagtcgctgctgcgcagcaccacgcccatcggcaagctgcgcggcaccgtacatagctatgaaggtatccccgtggtggtgacctaccatccggcttacctgctgcgcaccctgaccgacaaggcgcgcgcgtgggaagacctgtgcctggccagggaggtccatgaccgtgcgggagctggggcctgacctctccttgacccgcggcggcgacggcaacaggccgtcgggcccgccgctgtggcgccgcgccgcgtcggcgcgcacgcgcgacctggcctggaccacgctctcgccgccgctgctggcggcggtgccgggcgcggccccggcgcgctggcccgccggcacgctggccgcctggcaacactggctggaagccgctgaccccgccacgctgcccgccaccatcgacgaactggccgacggccacgtcgccccttccgccgacgatcccgaccaggatcccgccagccgcagcctgcgcctgggccgccatgccgagcggctgctgcattttgcgctgcgccatatgcaggggctgtcgctgctggccgccaacgtgccggtgcggtgcgcaggacggcagggtatccgcacgctgggtgagctggactttatctggcgcgagcaggcgtcgggcgcggtggtccactgggagatggcggccaagttctacctgatggcgcctggcgacagccaggtagcgcgggcgcaggatttcgtcggcccgaacctggtcgaccgccttggcgacaagctgggccacatcgtgcaccgccagctgccgctgggctgcaccgcggaggcacaggccctgctgggacatacggtggaccgcagcgaggtctacctgctgggctggctgttctatcacgatggccgggtgccgccggggctggatgcgctgggcatcgcgccagaccatttgcacggctggtggtccacgctcgatgactgggccgcccgcgcagccgctcggcccggcttgcgctggtgccgcctgccacgtaccggctggctgtcgggcgcgctggtgcccgaatccggcacggaagaagccggcgcgctgcgcgcgatgctggcgcagcgctttgccgacccgcgccatgaccacggctggcggcgcgaatctccggtgatgctgtgcgaactggagccggccgggccagaggcgccaggctggtggcgcgaatgctcgcgcgggttcgtggtgccgccggggtgggaagagcgggcgctggcgcgggcggcggagccgccaagaccggggccgcaggccgcgcaggacgcggcctgaccttcgctgcgccggctagtggtgcttgtcctcgccgatcatcgccagcgagttgaaggtgcgcgcgttgtacttgtgcagcttgagcaccagcgccatggtcacgcagataaacaggcccagtgcgacgatgaccacgccgatcggcacgttcagcttgatcagcagcgcatacaggcacagcatcagcagcaccgagacgttctcattgaagttctgcaccgcgatggagtggccggccgacagcagcacgtgcccgcggtgctgcagcagcgcgttcatcggcaccacgaagtagccagacatggcgcccaccaccatcaggaacacataggcaatggccatgtacagcggcatctgcaggcccatcacgtccagcgtgacattgggcattgcatccttggtgtagaacgccatgatcatcacggtggcgcccattgccacgccaaagggcagcaccgacagtgacttgcgcagcgggatgcgcgccgcggccaggatcgcgcccacggccacgcccacggccaccacggcctgcagcagcgcgccctgggacaggttcaggcccagcgatttctcggcccacttcagcacgatgaactgcagcgtggcgcccacgccccagaacagcgtggtcaccgccagcgagatctgtcccagcttgtcgcgccacagcgccacgaagcagtcgccgaactcggcgatcagcctgatcgggttcttttcctgcgccggatagcgggcgccggtatcggggatgaacaggttgaagatcgaggcgaccacgtagaacagcatgatcaccaccatcgcggcctcggccggggtgtcgatgccggtgttcaggaacgggacatccagctgcagcagcatgcctgacacgtgcacggaaatcagcgcgccgccgaccacggtgcccaggatgatcgagcccaccgtcaggccttcgatccagccattggccagcaccagtttctccggcggcagcagctcggtcaggatgccgtacttggccggcgagtacgccgccgcgccgaatcccaccacgccatacgccagcagcgggtgcagcccgaacatcatgatggcgcagccgaccaccttgatggcgttggtgatgagcatcacccgccccttgggcatggagtcggcaaaggcgccgacgaaggcggcgagaacgacgtaggaaagaacgaagaacagcttgagcagcggggtcatccactgcggggaatgcaattcggtgagaagggcgatggcggcgatcagtaaggcattgtcggccagcgaagaaaaaaactgcgcggccatgatggtgtaaaaacccttcttcatgctgtcgactttttctccatcgcgagctccgctcaggttggccaggctggcgcccaccggggaggccatggtttgcagggaaccttgtgccgcggccgtgtcgaattgtgtctgtggtgctgcgctgcggcgccttgaggcttgcctgacagtcattgacataatgcttcgcttttagaacatggccggagcgtccggctttatatcacgaaaacatgacattcccgaaccccggcaagggctctttttgacagcggattgccgtgccgattccccaatgacccccggcaacggcatctgaatgtgttcaaataacggctgcgatcgcgaccagccgaccgggtcttccccgatctggtgcgtggtcgaaccgatatggtgactgggatacaagggcgtgccaattccgcacattcccgcatgccagtcgccgcaacatgctgctgcacaccgacaggtgacgtttgcgccatcgatactgagacagagccgtacttccagcgcccgcgccggccgcccacgccgccagcggcgccgccggcttgctcgtccgcttcctgagatgtgacttccatgccaagacccatccacgctgtcatccaccaacccgccctggccaacaatctcgacatcatccgcggcaaggcgccggagtcgcgcatctgggcggtggtcaaggccaatgcctacggccatggcatccgccgcgtctttgccgccctgcggggcgccgacggcttcggcctgctggacctgaacgaggccgtgctgctgcgcgaccttggctggcagggcccgatcctgctgctggagggcttcttccagccgcaggatgttgccgtcatcgaacaataccgcctgaccaccgcgatccattgcgacgagcaactgcgcatgctggaaagcgcacgcgccaagggaccgctggcgatccagctcaagctcaataccggcatgaaccggctcggcttccatccggccgcttaccgtaccgcctgggagcgcgcacgcgccatgccctgtgtgggcagtatcgtccatatgacccatttttccgatgcggatagtgcccgaggcgtggcccaccagatcgaggctttcgacgccgctacggccaacctgccgggggaggccagcctgtcgaactcggccgcagtgctgtggcacccgcaggcgcaccgcgcctgggtgcgccccggcatcatcctgtatggcgcctcgccgaccgggcgcgatgccgatattgccggcaccggcctgcagcccgccatgtcgctgcacagcgaactgatctcggtgcaggacctgcagccgggcgataccgtcggctacggctccttgttcaccgccgagcggccgatgcgcatcggcgtggtggcatgcggctatgccgacggctacccgcgccatgcgtcgggctggggcgagcagcgcgcaccggtgctggtcgatggcgtgcgcaccgaactggtcgggcgcgtgtcgatggacatgctgtgcgtggacctgaccccgtgcccgaaggccagggtcggcagcccggtcacgctgtggggccagggcctgccgatcgacgaggtggcgcaagccagcggcacggtgggctatgagctgatgtgcgcactggccccgcgcgtgccgacctcggtggcgacgatcacggcttcggacagcgccgcgcctgccgtggcctgatccggggcgttggtgcgggcgctggcccgcgcacttgccatctgccggccgggccacttgtgggcccggctcgttttttcctgcaaggacatccgttggccaagaccaagactgtctatacatgtactgaatgcggcggcaccacgccgcgctgggccggccagtgcccgcattgccagcaatggaacacgctggtggagacggtggccgagtccgccgcgaacaagcgcttccagccgctggcggcctcggccacggtgcgcaagctgtcggagatcgatgccgccgacgtgccgcgcttttccagcggcatcgatgaattcgaccgcgtgctgggcggcggcctggtgtcgggcggggtggtgctgatcggcggcgatcccggcatcggcaagtccacgctgctgctgcaggcactggccaaccttgcgggccagcgccgcgtgctctacgtcagcggcgaagaatccggtgcgcagatcgcgctgcgcgcgcagcggctgggcgtggaaagcccgtcactggggctgctcgccgaaatccagctggagaagatccaggccacgctggaagtggaaaagcccgaagtcgcggtgatcgactcgatccagacgctgtactccgaggcgttgacctccgcgccgggctcggtcgcgcaggtgcgcgaatgcgcggcgcagctgacgcgcattgccaagagcagcggcatcaccatcatcctggtcggccacgtgaccaaggaaggcagcctggccggtccgcgcgtgctggagcatatcgtcgatacggtgctgtatttcgagggcgatacccattcctcgcaccggctgatccgcgccttcaagaaccgcttcggcgcggtcaatgagctgggcgtgtttgccatgaccgagcgcggcctgcgcggcatcagcaatccgtcggcgctgttcctgtcgcagcacgaagagaccgtgccgggctcatgcgtgctggtgacgcaggagggcacgcgtccgctgctggtggagatccaggcgctggtcgataccgcccatgtgcccaacccgcgccggctggcggtgggccttgagcagaaccggctggcgctgctgctggcagtgctgcaccggcacgcgggcatagcctgctttgaccaggacgtgttcctcaacgctgtgggcggggtcaagatcaccgaacccgccgccgatctcgcggtgctgctgtcgatccactcgtcgatgcgcaacaagccgctgccgcgcggcctggtggtgttcggcgaagtcggcctggccggcgagatccggcccagcccgcgcgggcaggagcgtctgaaggaagccgccaagctgggctttacgatcgccgtgattcctaaggcgaacgcgcccaaacagaagatcgacgggctcgaagtgatcgcggtggaacgcatcgagcaggccatcgaccgcgtgcgccatctggactgagccatggacgacggcatcgccttcgagaccgaacgcctgcggctgcgccagtggcgcgaggcggactatgcgccgtttgccgcgctcaatgccgacgcgcaggtgatgcgctatttccctgcgccgctggcgcgtgttgaaagcgatgcgttggccgaccactgccgcagcctgatcgcagcgaagggatggggcgtctgggtggcgcagcgcaaggcggacggtgttttcctggggtttgtcggactgcacgagcccaccgcggcgctgccgttcgcgccctgcgtggagatcgcctggcgcctggcgcggcacgcctggggcagcggctacgcgaccgaggcggcacgcggcgcgcttgcctggggctttgagcggctggggctggatgagatcgtgtctttcacgacactcgccaatgcccgctcgcgggcggtcatggaaaggctcggcatgcgtgaggatgccgtgggtttcgagcatcccgcgttgccgccagggcaccccttgcggccccattgcctgtaccgtttgccgcgtacggcgtggcaggcagcaggcagccggcgcatagcacccctgcgtcaatccgccacagggcagggggcttgcgctgcatgtgacgccaactgcaggcgctgcaaaataggtaataatgcgcagcaatgccgcgccatccactgacggcaccgcttaccggattacctgatcacccactatgcaagccaactcacgcgcctatttcctgctgatcgccctcgtttccttcggcctggtcggcgttgcgctctacctgcagtttgaaaagggctaccagccttgcccgctctgcgtgatgcagcgctttgcctttatcggcatcggcatcttctcgctgctggccgccgtggcgcagaatacacgctcgctgtggcagggcctgggcatgctgtccggcattgccgggattgcggtggcggtctaccacgtgtcgctgctgctcaatcccaaggccagctgcggcatcgatccgctggagaactgggtcaacgcgctgccgactgccaaggcgctgccgcaggtgttctacgcggatggcctgtgcaccgcgccgctgccgccggttctggggctgtcggtgccggcatggtcgctgatctggctgtttatcctgacgctgacgctggcggtggggttgatccggcgcgagaagaatttccgctgagtggtgaattgataaagaaaccggcgcaccaggcgccggtgtttgtttgatgcaacggattttcgagcagcgctggtttgctttgacgtagtcgggtagtacctgttgcgcagggccagccacagtagcttgatcgccgccgccacggcccggcactcctttctgctggcgtatcccaggctgttgcggatcagatgcatgatgcaggactgcagcctcgtttgggggaacaccgcgttcagggcctgttccatgcccttgaggccgtcagttaccgcagtcaggatgtcctgggtgcagtggtccggctagccactactccgtctcgctcttagcaagttgagagcgccttctgaaactattccatattatttcccggggcctgaaggatgctttgtccatgcaggccgctgccaccatttccctcgaccaactccgaagggagggcctgtgactgggcgacagaaatcctggtttcattcttgaagcatctactgatgtgccgtgccaactgtggagccgcatattttgcgccatagatgaaacgcagagcaggcccaaagctcagcgcggcggccggcccaaccacatataggtcgcgtacattggtttcgaaattgcgcgtcagacttggcgagccgtcaatgagtgaaagcgaattcaagagttcctgggaaatgaaggaatgtctggtcatgtcaaccttgaaccccgtcgcgacaacaacatgatcagcgctaaggcaggacgtttcgttcctggtcgcgacctgcagaactacctgaccattcttgacttcggcctgcctgatttcagtctgagtcaggatatcaatcttgccatccacgcgattgcgcagccaccaggcacccgacggtccccacccagtctctagagttctcttgcggcgctcaagattcatcatgtggaagacaatagggtactcggacaccaagaaggaagacaaaagagcgctcggagtattcgactgccaaccgcgtcctatcccgacgtgcgatctcagtagccttgagatacccccacgggaggtacgcggttcattactccaattcacagtcgctccgcgcacgagtaagcgaacccgcgctccgatctcgctcaacagtgcggcgagcccgattgccgactgacctccgcccacaacgacgatgttcttgttcttagcccattccagactcccgaattcgctggagtgaaccacgtaaggtgtcggcatgccctgtagtgctggaggcatttgcgaaaatcccttcagacccaaagccattaccacgcgccgcgccgccagggaactgccgtcgcccagggccagccggaagaatccatccttgcggtgcatatcgacaacttccactgcgcgaacatgactgaccaactgcgactgaaaccaaagcccgtattccacaaagagctcgagcggcaggtgcataccaatcggcttatattcaatacgattgcgacggcaatattcttcaatcgtatagccttcccgcggcgcatagagattcgaggcaaatccttccgagcgcaacagcatgcctggaggcatgaaattcctccaggcatgcattggtttcccaagaatttgatgtggcacgccagctgaggtcaggtaggccgaaaccgataagccatagggaccagctccgatgataaccgtatccgttgacgagatcattattgctcttccccttaaacttgcctggcttgcggagccgcgcagtacggaccaccgcatgatgctgcgggtgcagaaaatcattcttgaatcatttttccggtgctgtcatgtcttcgataaaatcatgccactgaaagtgcgaaccaaataaccacaggcgcggggcgaccatagtgcggcgccttgagagatcaaccgctctattgacttcacgattgaccatcgggcgcgccaatccaggcaattgaacagttgcgatcgcccaattcagcgtgtccaatagatcggcgtggcgtgctgcacagcgatttccgattgcttctatcgtgccgtccagccagattaaggcaatccagaaccaggccgccgtgtcttctgtacgggcgcgcacactcgctttcttgattctctttcgggtggccggacactgcttgcgcgcaggcgcaggtcgtcagagccatgtatgccatggcggacatagtcgaattgctggcgatgcaaccggttccagcaccggtggcgcggcgcaacgtggcctcgaccacattttggtccttcacacggaggctcggctttggttagatagactccggagcggaaatccattgtctgtcaggggatggccatgaatgccgctgcgggacgaactgggcggatcgatcatgaagcgtttgttcgacatagttttcgcctccatggcattgctcgtgctggccattccgttgctgatcctggctggcgcagtgcgatggaagctgggcagtccggtgctgtttcgtgcaacacgtgcaggcctgggtgccaggccattcgaagtcgtgaagttccgaaccatgacggaagagcgaggccctgatgaccagctcttgccggatgaagaaaggctcacgccgttcggcaattttctgcgccgctccagtctcgatgagctgcctcagttctggtgcgttctggtgggcgatatgagtgtcattggtccacgacctttgccgatgaagtacctgccgttctactcaccggaccaggcacgtcgtcatctggtccgtcccggcatttccggctgggcgcaggtgaacgggcggaactctctgagctgggaagataagtttcacttcgacacctggtatgtggaccactgctctttctggctggatctgaagatcctctggctcacggtgggcactgtcatggaccgccggggcatcaacgccgcgggggatctgaccgtgccttcatttacaggcagcccaggcacccagtacgtcgccagcgagtccgagcccgcgcagaaagaagaagttccgattcgcacggcatgacgagtgttcatgctgaatgccgcatgttctccttgtgaccatgcttctctcgcgaagagatcgatgccgtatcgtggcagttcagctcgaacaagacaagctaccggaccaggagggcaaggacgttggtgagaggctgtgccggtgggtgttcaaaggcgtgttgctactacgtgaatttgcgcacgtatcgtgcttctttccagccggtgattctgattagatggtaggtgttacggttgggcgcaggacaatggccgcagttctggcgggacggcttcgcgcgatcggtgagtcccggttcaagagcggcaaagaagaaagtcggcgctccagccgcaggaccgaaatccggtccgacgaaagcatcgaaagacctgcatgatggggctgtggggctatggcagggtcattgtggttggaatgagattggggtgaagatgaacgttcttttgacctgcatagggagacggcgctatctggtggagtatttcaagtcggagctgaacgggaccggcatggtgcttggggtggacatgcaacgcggcgcgccggccgcgagcgcatgcgacatgttcctggtaggccccggcctcttggcggataactacatcgacttcctgatcgatgtatgcagggtgcatcgggtctcggccctcctgtcgctgaatgacttggagctcccgctcattgccgagcacgctcaacggtttcgggaaatcggaacgataccggtcatctcgtcggcagaggtcattagcctttgcgcggacaagttcctgactgcgcagttcgccgaatcaatcgggctgtccacgccgcgcagctatgcgaccctcgaaagtgcagagcatgccattgcgacgggctcggtagccttccctctgattgtcaagccccgctggggcagcgctagttttggcatcttcgtcgtcgaggacctgaacgagcttcgcttcgcccgtgcgtactgccagcggatcttgcagaaatcgatcttcgcaaagatgggacagccagggatggaggtgctgatccaggaagtgatctcgggccaggagtacgggctcgatatcttcaacgactttgaggcgaggccgatcgggtttgcggtccgcaagaagctgttgatgcgggcgggggagacggaccgggcgatcactgtcgaaagcgcgccattcaacgacctggccacgcgaatcagtcgcgaattgcggcacatcggcaatgtcgactgcgatgtgatcgagcgcgacgggcgtcagtacctcctggagatgaatccaagattcggaggaggctatcccttcacccatatagcgggagccaacctggtgcggatactgctgaactgcgtgcgcggcgggcagcaagggcaggaagtccgctatcaggccggtatcgaactggccaagtgcgactacccggtcggcgtgggagcacgggttgaggagggataaaggcaggcgctaacaatcaatgcaacaggacggagcagccacactcgtccgagatggatcttgaaccagactgtcggcaaatcgcggcgatttccgtgagcggttgcgcgctcatttccatggcgcgccgggtcaattcggcagcgctgctcagtgtgagcacagcgaggcagatgcccgggagccgccaggcgacaggtgccggccaaatgcgtcccctcgtgaagagcgtcatcggtcagatgcttgccgacgcgccatacactgggcctttttgacattccgatgtgcgaaaccagacattgtgcggtttgcacacccgatagattgagggctcgcgacccgcccgccccgggccgtccacatttcgccactccctgcagggaggcatattgtgaacacttcaagcataccgaccaagcctttgcgcgcggtgttgatgcaacggctgaaacaacggctcaagccgtacacgccagcctggttgctgaaataccaccacgaccggaccatccgcaaagaccgcgcactgtatcagggaaaggcgcttcgcgaggtgttttcccatgtctacgaaaccggggggtggggcgtggcgaaggaccactccgggttctacagcgggagcagttctcatgatccggcgatcgtcgacacctatgtcgaagccgtaacggcctacctcggctcgttgccataccggccagacgtggttgacctcggttgcggcgatttcaatgtcggcagccgtatccggccggcttgcgcacgctatgttgcttgcgacgtggtggaggcagtcatccagtcgaaccgcaccaggttcttctccagtcttgatgtggacttccggtgcctcgacatcacaagcgagccctggccgagaggtgacgtcgttttcctgcgccaggtgctcgatcatctggacaacgcacgcattgccggcgtgcttgccagcctgacgccatacaagagcctgattctgactgagtatttgcctctggcacccgatttcccgccaaatctcgacaagccgatcggtcctggtctccggatttggggcgctataccaagcggaatcgtggtgacggagccgccgttcgagctgaaagccttgtcgacgcagatactctgtgaggtgcaggacaacgtaggcgtcattcgtaccatcgcgtacgaactgcctcggcaaacctgactgaacctctgccaagatgtaatgtgccgtccttgacggtgccaggggcaagggattttgacgtaggaggccagggccggttcgaggcccggcagtgcggcagcgacggcccaggcggcagttcgggtccggttaatcggatgatcggcgatgcggcccagcacttggcgcgggtagtcttggtgctgaggccgctgagctggctgtgccaatgagcgtgtaccccctgcgcccgaaaagaggcggtcacgcaatctgctcgatttgctcctgcaactccagccacttctcctcaagcgtctccagctcgccgttgacctcgccctggcgcttgagcatctccatcagcctggtcttgttggcttcggcataactgctttcatcggccatgaactggtcgatctcctccttggcggcttgcagcaccgccatgcgcttttccaccttttccaattctttggtcaacggcttgcgcagtgctgacagccgctggcgctcgtcggcttccgcgcggcgctggtccttgcggttgaccgccgcggtggcatcgccggcgttctctgccaggtgcgcggcggtggcggcattgcgcttggccgcggcctgttgcagcagccagtcgcggtagtcgtccaggtcgccgtcgaacggcttgatggtgccgtcggccaccagcatgaactggtcggcggtcgcgcgcagcagatgccggtcgtgcgacaccaggatcagcgtgccttcgaactgcgccagcgccatggtcagcgcctcgcgggtgtcgaggtccaggtggttggtcggctcgtccagcagcagcaggttgggcttctgccagacgatcagcgccagcgccaggcgggccttctcgccgcctgagaacggttcgatcggcgaagtggccatgtcgccgcggaagttgaagctgccgaggaagtcgcgcagttcctgctcgcgggtatcgggtgccagccgcgccaggtgctgcagcggcgagtcgtggtcgcgcagcgtctccagctggtgctgggcgaagtagccgatctgcaggcccttgcccaggcgcaggttgcccttgagcggatcctgcgtgcccgccagcgtcttgaccagcgtcgacttgccctggccgttggcgccgagcaggccgatgcgctggccgttctggatcgacagcgccaggttgtgcaggatggtgacgggcggctcggcctcggcatagccgcaatcgacaccgtcgagcaccatcatcgggttgggggcggcgtcgggttcgcggaactcgaaagcgaagccggcggccacgtgcaccggcgccagccgctccatcttttccagcgccttgacgcggctctgcgcctggcgcgccttggtcgccttggccttgaagcgcgtgatgaacgattccaggtgcgcgatttccttctgctggcgcacgtaggcggattgctgctgcgccatctgctgcaggcgcagggtctcgaacagcgtgtagttgccgccgtagcggcgcagttgctggttctcgatatgcacggtgacgttgcagatcgcatcgaggaattcgcggtcgtgcgaaatcatcaccagcgtgccgggatagcgcgccagccagtcttccagccagacgatggcgtccaggtccaggtggttggtcggttcgtcgagcagcagcaggtcggacgggcacatcagcgcctgcgccaggttcaggcgcatgcgccagccgccggagaacgaggccaccggctgcgacacctgcgccagcgtgaagcccaggcccagcagcagggcctcggcgcgcgccggggcggtgtagccgtcggcgtcggcaaaggcggcgtgggcttcgccctcggcgctgccgttgccgctggcctgtgcggcggcgatggcgccttcgatttcgcgcaggcgggtgtcgccatcgatcacgtaatccacggcggtgcggctgaccgcaggcgtttcctgcgccacgtgtgcgacgcgccactgagccggcacgatgacatcgcccccgtccggatgcagctcgccgcgcagcagcgcgaacagcgtcgacttgccgctgccgttggcgccgacaaggcccacgcgctcgcccgggttgagcgtcacgctggtgtggtcgaacagcaccttggtgccgcgctggaggactagctggtcgattcggatcacgggagggggaaatgcctgagtgaaaaacagaaaaagcgcggagaaagcgggcaaccgccgggtctggtgcgctggccggcattgtagcgtttccggtgcgccgcacgccgtggcggtgcaaaacagcccggcaacgtgcaccgccaatgtgccttcgtgcctcgacgattcagggattacccttggtcttgcaaaactctattttcttgttcgtgcgttgcgtgtaaattcattttcacgaaaacggcgtgcatcagacgacgtccagaccaaccgcttccaccatgcaaaaaggccattcgatctcagaccgcattgcgcgcagcctgccgacgctgacgccggcgcaccgccgcatggcggaatacgtgctggccaatctgttccgcgcagcgaccatgcgcatcgacgaatttgccgcggcggtggaggtgtcggtggccacggccaaccgctttgcgcgggcgctggggttcgacggctatccgcagttccgggccgagctggtgcgcggcttcgaggccacgctggctccggtggagcggctgcgcagcgagctggagcggcccgcgaccgcggccgaagtcttcgccgcctcgctggaagatgccgcggccaacgcggaagccacgcggcgcggcatcgacccggaggcctgcgagcgcgcggtctcggcgatcctggcggcgcagcgtgtctacgtggccggtttcggcgccagcggtttcctggcgggcctgctgcagcacgggctggaaatgcactgccgcatggtgacctcggtggcgggcgccggcggcgcctcgcatgcggcgcggcagctgttcaagcagcagccaagcgacctgctgatcgtgattgccttcccgcgctacgtcacggacaccatcgaactggccgagcgggccaagtcgcgcggcggccaggtgctggcgctgaccgacgggccgacctcgccgctggcgccgctggccgatatcgcgctctacgcgcaggccggcaaccggctctcggccaactccgatgccaccgtgctggcgctgatcgaggcgctgtgcggcgcggtcgcgcaccgggccgagcgcccggtcaaggccgccgccgaaatgaccgaattcctgctgccgtggctgtacggcacgccggccgcggagtccgcgggccgtgccgcgcccggcaccccgcagtccaccgaagccacggctggcgccacgcgcggccgatcctccaacacccgcaagtcctgagcatccacatgcaaccagcagtcattgccatccacggcggcgccggcaccatcacccgcgcggcgatggacgccgcccgcgaacgcgaatacatcgaagcgctgcaacacgtgctgcaagccggccagcgcatcctggccgagggcggcagcgcgctcgatgcggtcaccgaggccgtgcgcctgctggaagaatgcccgctgttcaacgccggcaagggcgccgtgctgacccatgccggcacctatgagctcgatgccgcggtgatggacggcgccacgctggcagccggcgcggtggcctgcgtcacgcgcctgcgcaacccggtgctggccgcgcgcgcggtgctggaccacagcgagcacgtgctttttgccggcgccggcgccgaggcctttgcgcagtcgcaggggctggaactggtgggcccggactactacttcacgcaggcccgccatgaccagtggcagcgtgcgcttggcaacgccggcatggcgctgctggatcacgatggcgctgcgctggtggcgcaaggcaagacgcaggcgagcgacccgatcgatccggacagcaagttcggtaccgtcggcgcggtggcctgcgacggccgcggcaacctggctgcggccacctccaccggcggcgtgaccaacaagcaggtggggcgcgtgggcgataccccggtgatcggcgcgggctgctatgcggacgacgtggcggcagtgtctgccaccggcaccggcgagatgtttatccgcaccgtggccgcgcacgacgtggctgcccagatgcgctatgcgggcctgtcgctcgaggaatcagcgcggcgcgtggtgatggagaagctgccggccatcaacggccgcggcggcctgatcgcggtggaccgcgccggcaacgtcacgctgcctttcaacaccgaaggcatgtaccgcggtttcgcccgggtgggcgaggccgtgaacgtgtcgatctacggctgagcgccatccccctgcatcacccggcaatacaaggagttccagtggccacttcccctatgcaagcctcccagtccggcatcgtgctgccaccgcagcgcgtggtctcggtgaacgggctgaccgtgcgctttgccacgtccgagcgcaccgtcgaggccgtgcgcaacctgtccttccatgtcgaccgcggcgagacgctggcggtggtgggcgagtcgggctcgggcaagtcggtcacgtcgctggcgctgatgcggctggtcgagcatggcggcggcaagattgcctccggcagcatggcgctgcgccggcgcggcggcgaggtgatcgacctggcgcgcgcggacaacgccacgctgcgcagcgtgcgcggcgccgacgtggcgatgatcttccaggagccgatgacctcgctcaacccggtgttcccggtgggcgagcagatcgccgaatcgatccggctgcaccagggcaagagccgcgccgcggcgcgtgccgaagcgctgcgcatgctggagctggtgcgcatccccgaggcgcgccgcgtgctggagcgctatccgcaccagctctccggcggcatgcgccagcgcgtgatgatcgcgatggcgctgtcgtgcaagccggcgctgctgatcgccgacgagccgaccacggcgctggacgtgaccatccaggccgagatcctgcagctgatccgcggcctgcaggccgagatgcacatgggcgtggtcttcatcacgcacgacatgggcgtggtggccgaggtcgccgaccgcgtgctggtgatgtaccgcggcgagaaggtggaagagggcacttccgacgatgtgttccgcgcgccggcgcacccgtatacgcgcgcactgctgtcggcggtgccgcgtttgggcgcgatgagcggcaccgacctgccggccaagttcccgctgctgcgactcgatagcgccaacgccgagccggtcgcaccgcaggacacggtgacgccgggcgtggcgccgatcctgcgcgtgcaggacctggtgacgcgcttcgacgtgcccggcggcctgttcggccgcgtcacgcggcgcgtgcatgcggtcgagaaggtcagcttcgacctctatcccggcgagacgctggcgctggtgggagagtccggctgcggcaagtccaccacgggccgctcgctgctgcgcctggtggaaagtcagagcggcaccatcgagttcgccgggcagaacatcagcaagatggaagggccggcgctgcagaccctgcgccgcaatatccagttcattttccaggacccgttcgcctcgctcgatccgcgcgtgccggtcggttattcgatcatggagccgctgctggtgcacaaggtcgccagcggtaaggaggccgagcagcgcgtggcctggctgctcgacaaggtcgggctggacgcatcgcatgcggcgcgctacccgcacgagttctccggcggccagcgccagcgcatctgcattgcgcgcgcgctcgcgctgaaccccaaggtggtggtggccgatgagtcggtgtcggcgctggacgtgtcgatccaggcgcagattgtcaacctgatgctggacctgcagcgcgagcttggcatcgccttcctgtttatctcccacgacatggcggtggtggagcgcgtgagccaccgcgtggcggtgatgtacctgggccagatcgtcgagatcggcccgcgccgcgcaatcttcgagaacccgcagcacccgtacaccaagaagctgatgtcggcggtgccgatcgccgacccggcgcggcgccacctgcggcgcgagccgctcaacgacgagatccccagcccgatccgcgcggttggcgacgagccggtggtgcagccactggtgcaggtcgccggcagcgggtcgctcggccactatgtcgcccggcatgccgtcggcggcgcctattgaagtcctggaagtcaccaagttaccaaggagaatcgacgatgtctgcacgtatggtttcgccccgatgggtggccggcgcctttgccgccggcacgctgggcatgctggtttcggccccggctttcgccgccaaggatgccgtgatggcggtgagttcgaccttcacctcgctggatccgtacgattcgaacgacacgctgtcgcaggcggttgggaagagcttctaccagggcctgttcggcctggacaaggatatgaagctggtcaatgtgctggcagacagctacgacgtcagcaaggacggcctgacgtatacgatcaagctgaagaagggtatcaagttccacgacggcaccaccttcgacgccggcgccgtcaaggccaacctggaccgcgtcaccaacccggccaacaagctcaagcgctacacgctgttcaaccgtgtcgccaagaccgacgtggtcgatgccaataccgtcaaggtcacgctgaaggagccgttctcgccgttcatcaacgtgctggcgcacccgtcggcggtgatgatctcgccggccgcgctgcagaagtacggcaaggaaatcgccttccacccggtcggcacgggccccttcgaatttgtcgaatggaagcagcccgaccacctgaagggcaagaaattcgcgggcttctggaagaccggctacccgaaaatcgacactatcacctggaagccggtggtcgacaacaacacccgcgccgcgatcatgcagaccggcgaggctgactttgccttcagcatcccgttcgagcaggccgcggtgctgaagaacagcgccaaggtggatctgatcgcctcgccgtcgatcatccagcgctacctgtcgctgaacaccatggtcaagccgttcaacgaccccaaggtgcgccaggccatcaactatgccatcaacaaggacgcgctggccaaggtcgccttcgctggctacgcggtgccggccgaaggcgtggtgccgcctggcgtggactatgccgagaagctgggcccgtggccgtatgacccggccaaggcgcgcgcgctgctgaaggaagccggctatccgaacggcttcgagaccacgctgtggtcggcctacaaccataccaccgcgcagaaggtgatccagttcgtgcagcagcagctgcagcaggtcggcatcaaggcctcggtgcaggcgcttgaggccggccagcgcgtggagaaggtcgagagcgtgcccaagccggaagatgccggcgtgcgcatctactacgtgggctggtcgtcgtcgaccggtgaatcggactgggcgctgcgtccgctgctggcttcggagtcgatgccgcccaagctgctgaataccgcgtactacaagaacgaccaggtcgacgccgatatcgccggcgcgctgcgcaccaccgatcgtggcgaaaaggcgcgcctgtacaaggacgcccaggaacgcatctggaaggatgcgccgtgggccttcctggtgaccgagaaggtgctgttcgcgcgcagcaagcggctgagcggcgcctatgtgatgccggatggatcgttcaatttcgaagagatcgatatcaagcagtaatgggtgaggcgagggccgggacttcgtggaagctcctgccctgtcccccggcccctctcccgcaagcgggagaggggagcaaacaacgggtgccggctgtaatcccatccaaagagcagtaagcagtaaagcagtacgccgaggtggccgccttgcccgcgtcgcggggtcgcaggcgggcggcctgcggcctctgctgctgcatttctttctggtgtgtcatgctgaattacttcctcaaacgtgtgctgggcgtgatccccacgctgctgatcgtggcagtgctggtgttcctgttcgtccacctgctgccgggcgatccggcgcggctggcggcgggcccggaggccgattccgccaccgtcgaactggtgcgcaaggacctgggcctggaccggccgatgcacgagcagttcgtcaacttcttttccaatgcggtccgcggcgagttcggccattcgctgcgcaccaagcgcccggtcagcgaggagatcggcgaccgcttcatgcccacgctgctgctgacggtggcgtcgatggcctgggcggtggtgttcggcatggcgatcggcatcggctcggccgtatggcgcaaccgctggccggaccggttcggcatgacgctggcggtgtcgggcatttcgttcccggcctttgcgctgggcatgctgctgatggaagtgttctcggtgcagctgggctggctgccgtcgatcggcgccgacagctggaagcactacgtgttgccgtcgatcacgctgggcgcggcggtggccgcggtgatggcgcgctttacgcgggcctcgttcgtcgaggtgctgcaagaagatttcatccgcaccgcccgtgccaagggcgtgcgcgagacgctggtggtggccaagcacggcctgcgcaacgccatgatcccggtggtgacgatgatgggcctgcagttcggcttcctgctgggcggctcgatcgtggtggaaaaggtgttcaactggccgggcctggggcgcctgctggtcgatgccgtcgagatgcgcgactacccggtgatccaggccgaggtgctgctgttctcgctcgaattcatcctgatcaacctggtggtggacatgctctacaccgtgatcaacccaaccatccgctacaagtgaggccggcatgactgagctttccacgcccgccgcagcgcaagcggcacccgccaccgcctccgtgccggaggccgtgcgcacgccctggaccgagttctggcgcaaattccgcaagcagcacctggcgctgggcgccggtgccttcgtgctggtgctggtggtgattgccatcgtggcgccgcagatcgtgccgtacgacccggagaactacttcgactacgacgcgctcaacgccggcccgtcggccgcgcactggatgggcgtcgattcgctcggacgcgacatcttcagccgcatcctggccggcgcgcgcatctcgctggcggcgggtttcctgtcggtgatcatcggcgcgctgatcggcaccgtgctgggcctgctggcgggctactacgaaggctggtgggaccgcatcgtgatgcgcatttccgacgtgctcttcgccttcccgggcatcctgctggcgatcggcatcgtggccatcctcggcaacggcatgaccaacgtgatcttcgccgtggccatcttcagcatcccggcgtttgcacggctggtgcggggcaatacgcttatgctcaagcggttgacctatatcgaggcggcgcgcagcatcggcgcgtcggactggaccatcctgatgcggcatatcctgccgggcacggtgtcgtcgatcgtggtgtatttctcgatgcgtatcggcacctcgatcatcaccgcggccagcctgtcgttcctggggctgggcgcgcagccgcccacgccggaatggggcgcgatgctcaacgaagcccgcgccgacatggtgaccgcgccgcacgtggcgattttccccagcctggcgatcttcctgaccgtgctggccttcaacctgctgggcgacggcctgcgcgacgcgcttgaccccaagatcgaccgccgttgaacctgagccgctgaacatgaccgcatcgacaacgggcgtgccgcgtgtcggcagcctgccggcaggtccgctggacagcatcgccgacgtcgccggcgtgaccgtcggccattgcacgctggcggacggcgccgtgcagaccggcgtcaccgtgatccgtccgcatggcggcgatccgtaccgcgacaaggtgcccgccgcggccacggtgctcaacggctttggcaagagcatcgggctggtgcaggtggacgaactgggcgtgctggaaaccccgctggcgctgaccaataccttttcggtcggcgcggtcgcgcaggcgcagatccgtgcggcggtggcggccaatccggagatcggccgcgcgctgccgaccgtcaatgcgctggtgttcgagtgcaatgacggctacctgaacgatatccagcgcatggcggtggagggcagccactatgaggcggccctggccggtgccggtcatgacgtcgcgcagggagcggtcggtgccggacgcggcatgtcggcattcggcgtcaagggtggtatcggcactgcttcacgcctggccggtggctatcgcgtgggcgcgctggtgctggccaatttcggcacgccggaatcgttgaccgtggccggccggctggccggtccggaactggtgcagcgcctggcgcagcccgacaccgcggcgcaaccggaaaagggatcgatcatcatgatcctcgccaccgacgccccgctggatgcgcgccagctgcgccggctgtcgctgcgcgccggcgccgggctggcgcgtactggctcggtgttcgggcatggctcgggcgatatcgcagtcgcgttctcgagcgcgtataccgtgccgcacgacaccgcccggccgatgccggccgtcgccatgctgcatgaaacccatctcgacccgctgttccgcgccgcggccgacagcgtcgagcaagccatcctgcatgccctgtggcatgccgcaccggtgcagggccgcgacggccacggccggcgcgcactgctggacgtgatgcccgaactgggccaaaccgcctgatgaagatccttgtttccaccgatatcgaaggcgtggctggcgtcttccacgccgaacagacgcgccccggcaacggcgaatacgaacgcgcccgcgcctggatgaccggcgaagccaatgccgcggtcgatggtgcctttgccggcggcgcgactgaagtactggtcaacgattcgcacggcggcttccgcaacctgctgccggaccagttcgatccgcgcgcgcgggtggtgcttggcaagccgcgctaccttggcatgatggccggcgtcgaggccggagtcgacggcgtgctgatgatcggctaccacggccgcgcccagagccgcggcgtgctggcgcacaccatcaacagcggcgcgtttgcgcgggtctggctcaacggcaaggaactgggcgaggcgggcctgtacgccgcgctggccggcgagttcggcgctccggtgctgatggccagcggcgacgatgtcttcgtgcaggaaacccatgcgctgatgccgtgggtgcgctatgtcgagaccaagtcagcggacggcttcggcagcggcacctcgctgtcgccggcggcggcgcgcgaggccattgccgcggcggccgcaaccgcggtgcgcgaacgcgcgcaggcgcaatgcctgcgcatcgccgcgccggtgacttgcaccctgcagaccctgacgcccgcgcacgcggacctgttctgccagtggccggcgctggagcgccgcgacggcgtgacgctgtccttccaggccgattcggtccaggcggcggtgcgcatgctgaactgcctgtcggcgatgtcgttcatgctgaagtagggcagggcagattcgccgggacgagcgcgcagatcggcgacaatggcgggtctagcaattcaggtatgagccgcaacgcatgacccaggcacacgacgggggctggatccccgtgcgcaaggacttcgtcgaccccgccacgcgctgccatgcgcggggcgcgagccgccgccaccatggctttccgaccgggcaggcttatatcctgcgcgacgccgcagggcatgaatacccctttggcgacgactgcgcgcgtgccgcggtgccgcatccgggcctgctgctgcaggtgccggactacaccgagcgcgatgtggtgccgcgcacggccttgcccgaggtggcgcccccggcccgccggcgcgatcccgcccaggcgcaggccgccgagcgcgccgccgcgatccgctacctggtgctgcgcatggagaaggtggccgcggtgccgcgcgtgcagccgacagtgcgtttcccggcgcttgagggcgtctacgagcagtaccagcgcacttgcgacatcggcatggcgcaagtgcgccgcatcctggcgatcgagcgcagcccgtccaccccgccgcggctgcgcgccaccaacctgctggacgtctataccgcgcatatcaagctggaatggctgatcgcggggtccaacagcgtcgacaacatccgcttcctgcgcagtctgcacgactggctggcccgtcacctggtgctgaccgccggccagctggccgcggccgggatcgagatgcatccgcaggcgttcaccgcgcccggcatctgggggccggggacagagcccgcgccggcatcgcccgggtacgcatccggatcgctgttttagctgcgggtggcaagacctgcggatttggcgtctaatgcctgcatcgcatcagccggtcacgccatgagccatttttctcgcagctacgccgaagcccgccagaagttccttgacgccgcgcgcacggccggggccgcgctggcccagttcccgcaccccaccaagcgcggcagtgccggcgaggacctcgccatcgacgtggcgctggccggtccggccgaggcccgccgctgcctgatggtgacctcgggcacgcacggcgccgaaggctttgccggatccggcgcgcaggtgacaatgctgcacgacgccgcgctgcttgccgattgcgccgccgccgacaccagcctgctgctggtgcatgcgatcaatccctacggtttttcccacctgcgccgggtcaacgaggacaacgtcgacctgaaccgcaatttcatggacttcacccagccgctgccgtacaacgaggcctatgccgagatcgcgccgctgctggtgccggcgcaatggccgccgtccgacaccgaccaggcgcaactgatgaaggccgttgccgagcgcggcatgccgtggtaccaggccgcggtcagccgcggccagtaccaggacccgggcggcatgttctacggcggcgacaaggctgcctggagcaactacacgctgtgccgcatcctggcgcgcttcggcgccgggcgcgaggcgctgcgctggatcgacgtccataccggacttggcccctggggctacggcgagcccatccacatgggcccggacacgccggaatcgctcacgcgcacgcgcgcgatctggggcgcgcgggtaacctcgatctacgatggctcgtcgacctcggccaacctcaccggcctggcctggcacgcggtgctgcagaccctgcccaccatcgactacgccggcatcgcgcttgagttcggcacgctgccggtgggcgaggtgctggacgcgctgcgcggcgaccactggctgcaccagcacccggaagccgacgaaaaccagcgcgcgctggtccgccaggcgatgtggcgtgccttctatggcgataccgacgactggcgcgagggcgtggtggcgcaggtgaccgacgcagtgcgggacaccattgcctcggcctagccggctctggccgcaagcgccttctggtaatgtctcgacgttggcggtagagtgctgagccaggcactgccgccatgccttggccggcacgagcagcagccgcgccgcggtcagaaaattaccagaaacaagacggaagaggtcggggcaggcccgggcgcatgatcctgcgcgtcgccgcggcctggcgcacggcgtcgcttccggcatcagctcggcagggaggccggtgcgatgaccctctatgaactgaagcccaggttccaggcccggttgcgccccatggtgcaggacctggcgcagcgcggcgtgactgccaaccaggtgacgctggccgccgcggccggctccctggcggtgggggtgctggccacgctgggcatgctggtggccgagaccccggcgctgttcctgctgttccctctatggttgttcctgcgcatggcgctcaacgccgtcgacggcatgctggcgcgcgagcacggccagcagagcgtgctgggtgtctacctgaacgagcttggcgacattgcctcggacctggcgctgatcctgccgctggccgcgctgccggacttcagcctgggccaggtcggcaccttcgcgctgctggcggtgatcgtcgaggccaccgggctgatcggcccgctggccggggccagccggcgctacgacggcccgctgggcaagagcgaccgcgccttcgcggtcggcgcgatcgcgctgtgggcaggtgttggcctgggctttggcgcggccgccagctggctgtggctggtgctgtcgctgctgtcgctgtttacgattgccaaccgggtgcgccgcggtgtcgccgaggcccagtcccgcacagcggagtagcgagatggaccgaccgtcgacgcgccagccgcaagagcggcaattcgagacccacgaccgccagacgctgttctatcggcactggccggcggtggagggcccggcgcgcggcgccgtggtgttgttccatcgcggccatgagcattccggccgggtcgcccacctggccgacgaactgaacctgcccggctacgagatctttgcctgggatgcgcgcggccacggccgttcgcccggcgagcgcggctacagccccagcctggcggactcggtgcgcgatatccagaccttcaccacccatatcgccgaggtccacggcatcccgctggaacgcaccgcggtgatcgcgcagagcgtgggcgcggtgctggccgccacctgggtgcacgactacgcgccgccgatccgcgcgctggtgctggcctcgcccgcgttcaaggtcaagctctacgtgccctttgcgcggccggggctgaagctgatgcagcgcctgcgcggcaagtttttcgtcaacagctacgtcaaggccaagttcctcacgcacgatcccgagcgcatcgccagctacgacagcgatccgctgatcacgcgcccgatcgcggtcaatatcctgctggacctgtacgacacggcggagcgcatcgtcgccgatgccgcggcgatcacggtgccgacgcagctgctgatctccggcgccgactgggtcgtgcatcgcgggccgcaggaccgcttctatgagcgcctgggtgcgcgcaccaaggagcgcatcgtgctggacggcttctatcacgacacgctcggtgagcgcgaccgcaagctggcggtcgatgccgcgcgccgctttatcctgcgcgaattcgacatgccgtcggcgccgcgctcgctgctcgatgccgaccagatcggcccgttccgcgaggaatccgaccgcctggcgtcggcgcctgtcgggctggccgcctggtactggcgcgcggcgcgggccaacctgaagctgggcggaatactgtcggacggggtgcggctgggccatgagaccggcttcgactcgggctcgacgctcgactatgtttaccgcaacgccccctcgggccgcggcaagctgggccggctggccgaccagcagtacctggacgcgatcggctggcgcggcatccgccagcgcaaggtccacgccgaggccctgatcgccgaggccgtgcggcggctgcgcgcgggcggcatgccggtgcggatcgtcgacatcgccgccgggcacgggcgctatgtgcttgaggcgctgggcgcgctggatggcggcgccgcggcggtcgagtcgatcctgctgcgcgactacagcccgctgaacgtcgagcagggccgcgccctgatcgccgccaaggacctcgcggacgtggcccgcttcgagcagggcgatgccttcgacggcgacagcctggcggcgctggcaccggcgccgacactggcggtggtttccggcctgtacgaactgtttcccgacaacgcgatggtgcggcgctcgctcgagggcctggcgcgcgcggtgccgcccggcggctatctggtctacaccggccagccctggcatccgcagctggaattcatcgcgcgcgcgctcaccagccaccgcgccggcgccgcctgggtgatgcgccgccgctcgcaggccgagatggacgaactggtgcgggccgctggctttgacaaggtgacccagcgtatcgacccgtggggcatcttcaccgtcagcctggcgcgcaggcgcggcgcatgagcacggtgccgacggaggttggcgccggggcgcattcgcagctgcctgcaggcaaccggccctgggggctggcctgcctgctgctggcgctggccggcgcgttctttttctccagctacggctttgccaactggctggcgagccagcgcgccaacgttccggcggtctatttcgaatgggagcaggggatcccgttcctgccgtggaccatcgtgccgtactggtcgatcgacctgctgtacggcatctccttcttcctgtggcgcacgcgcgcggcgctgctcacgcacgtcaggcggttggtactggcgcagctggtgtcggtggcgtgctttatcgccttcccgctgcgcttcagctttgcccggcccgaggccgacggcctgccgggccagctgttcacgctgctgggcggtttcgacctgccgttcaaccaggcgccgtcgctgcatatcagcctgctggtgatcctgtgggtcgcctttgcggcgcacctgcgcggcggctggcgctggctgctgcacggctggtttgcgctgatcggggtctcggtgctgaccacctggcagcaccacctgatcgatgtgcccaccggcgcgctggtgggctggctgtgcgtttacctgttcccgatgcaacggcccgctgcaggcgcgccggatgcgcgcacgcgccagctgtcgcgccgctacaccgtgggcgcgctggtggggttgctgtgcgcggtgctggcggtgggtgcgtcggtgacgctggcgttgctgctgttgtgggccgcgctggcgctggcctgcgtcgcccggatctacgcgctggccgcgccggcgtggttccagaaggacggcgatgggatgatggccccggccgcgcgctgggtgctggcgccgtacctgctgggcgccttcctcaattcgcgctggtggacgcggcgcgcgccgcagcccagtgccatcgcggacggcatctgggttggccgcttcccgacccgcgccgaactgcgcgcgatcggggcggacgccgtcctcgacctgaccgccgaactgtcgcgcgcagccaccgacccggcgcttgcgtatcgttgcgtgccggtactggacctgaccgtgccgacgccggagcagttggacaaggccgtggctcaactcgacgcctggcagcggcagggccgccgcgtgctggtcagctgcgcgctcggctattcgcgcagcgcgctggttgccgccgcatggctggcgcgccagcagggactgcgcgacgccggcgctgcgctggcgttgctgcgcgagcatcgcccggcggtggtgctcgggcgcgaacatgctgaggcgctgcaacgctgcctggaccgtcccgccatgccggagcccgatgatggccgctgagttcacgcaaggcactgatgcctggatcgcgcacgccgtcgccggggcgctgtcgggcgccgtgtggatcggcgcggccgggctggctttcggcgtggccacggtatggctgggggtggccacgccggtcccgcgcgtgctggcggccgcgtcgctgctgctggcgctgccccaggtctggctgctgctgcgcgttgccatcgaccgccggctgttcgatgcgctcgcggccgggcggcaggaccagcccgacctggccggattggacgccgcgctgctcgaactgggctggatgccggcgcagcgcgccggccgtccgttgccggaccgcgcccgcggtgcgctgcggctggtgcgcgccagcgccgcgctgactgtgtgccagctggcgctggccttgctgaccgtgatcctgaggtaaccaaccatgtggcttgcccgcgcgaccgcgcgcgccatcatcgtcttcgcccggctgctgaccggcatgcgcgccaactggcagggctgcatccccgccgcggtgcagcgcgtctactttgccaaccacagcagccacggcgacttcgtgctgatctggggctgcctgccgcccgacctgcgcacagtcacgcgcccggtggccggtgccgactactgggatcgctcgtcgctgcggcgctttatcggccgcgacgtattccacgcgctgctgatcgaccgcacccgcagcgaaccaggcagcgacccggtggcgctgatgcacggcgcgctggcatccggcgactcgctgatcctgtttcccgaaggcacgcgcaataccaccgacgcgcgcctgctgccgttcaagagcggcatctaccacctggcgcgggcctgccccggggtggagttcgtgccggtgtggatcgacaacctcaaccgcgtgatgcccaagggcgaagtcgtgccggtgccgctgctgtgcaccgtcacctttgggcagccggtgctgctggccgccgaggacagcaaggaagccttccttgcgcgctgtcgcgacggcctgctcgcgcttgccccggagctggaatgaccgccatgcccactttgcactggagccccgagacctggctgctgttcggcggactgttcggcgtgctgctgctggcctccaccgtgaccgcgctgctgcgctggcgggtggcgggcggcggccagcacgcggtgatcgacaacctggcgcagcgcgtctgggcctggtggtggatgatcggcatcatgggcgtggcctttgcgctgggccgcaccgcggtgatcgtgctgttctacctgctttcgttcttcgcgctgcgcgagttcgtcaccatcatcaccacgcggcgcggcgaccatcacgccatcgtcgccgcctttttcgtgttcctgccgctgcagtacgtgctggtctatatcggctggtacggcatgttctcgatcctgatcccggtctatgccttcctgatcctgccgatcctggcggcgctgtcgtccgagaccacgcgcttcctggagcgctgcgccggagtgcagtgggcggtgatggtgtgcgtgttctgcatctcgcacgtgccggcgctgctgacgctgccgatcccgggctttgaaggccgcaacctgctgctgatcgccttcctggtgatcgtggtgcagggcagcgacgtgctgcagtatgtgtggggcaagctgtgcggcaagcgcaagatcgcgccgctgctgtcgccgtccaagaccgtcgagggctttgtcggcggcgtggccagtgccaccgcgctgggcgcggcgctgtggtggatcacgccgttctcgccgtggcaggccggcgcgattgcgctggtgattgcgctgatgggtttcctcggcgggctggtgatgtcggcgatcaagcgcgaccgcggcatcaaggactggggccatatgatccagggccacggcggcatgctggaccggctggactcagtggtgttcgccgcgccggtgttcttccatatcacccgctactggtgggtgccctgagcaccccggccctcacagctccatctcttcgcaccacgccaccactgcatcgcggaagtcctggcagatcggcgacaggtagccatcggcgcgccacagcacggccagctcatgctgccacgacatgcctggcgcctcgatcgcggccagcccctggccctcggcctggtgcagcatgcgcggcggcatgatgccgagcaggtccgagtgccgcagcagctcgccgaaggccaccggcgacgccgtgctttccactgccacgcgcggcggcggcagcccgaccgaggtaaaccgttcctccagccactggcgcaggtagagcgaactcgccggcaccacccagcgctcgccgctcaggtcggccagcgtgcggaagccctcgcggcgcggatggccggtgcgggacacgatctgcatggtcagcggaccgagcggcagccaggcaatgtccggcggcaggctggtcgggcgcgcgcccaggatcaggtcggcctcgccgttctgcagcatcgccatcaggcgcgcgctcaggtgggtctcgatcgagaacgtggccagcggccggctcaggaagaagcgggccagcagcggcgacagcagcgacggcagcaggtaggggatggcgcccaggcgcaccgtgcccgcgcgcgccgcgcgctgctcggccagttcgttgcgcatgtcgcccgccgccagcgcgatccggcgcgcatgggcggccagggtgcggcccacgctggtcggcaccagcccgcgcggggtgcgctcgaacaagggcatgccggcttcgccttccagccgcgccagcgtcttggacaggccggactgggtcatgccgagggtgtcggcggcgcggtgcaggttgccttgctcgatgacaaccaggaaggcttcaagatcctcgaatcgcatggggcgtgatggcgctggggtcggtgcgggccattgtagcgccgcacctcccccgcgccggtcacgcagggcttagtgcggctcaggccattgccgctggggttccgaggcgcgctcgaaccagtgcgccagctgcagcacgcccaggtcgtcaaagcgccggccggagatctgcagcccgatgggcaggccgtcgcgcgacatgccgcaggggatcgatgccgcgggctgttcggagtggttgaacaccgctgtgaagtgagagtccttgagcggcaggtcgccgccgctgttgatggcatcggcggcgaagggcagcaccggtgacaccggcgagatcacgaaatcatagggctgggtcgcggccacggtggcctcgcgcagctgctgcatgcgcgtgaaggcctggaaggtctgctccggcgtgagcgtgccggcaaactcggcggccttgcggatgtagcctgccgccaggctggcgcgctccggcggcatcccggccaggtcgacccggcagcgcatggtgaagaagtgcgccatgccgatgcgcatgtccatggtggtccagtcgcgcacgggttcgaccacggcaccgccttgctcgaacaggtgcgctgccgccagcaccgccgcgcggacttcggcatcgacctgccagtcgccgctcgggtccagccacaggccgatgcgcagcccgcggatatcgcgctcaagctgctgccaggcgatgtcctgcggaggcaggctcatgtagtcgcgggcatcggggcgcgagatcgcctgcatcgccagcgcggcgtcggccacggtgcgcgtcagcggaccgatcacgcgcgcggcggctggcggatggaccggcacgcggccatggctgggcttcaggccgaaaacgccgcagaagctggcgggaatacgcaccgagccgccgatatccgtgcccaggtggagcgggccgtagcccgccgcagccgcggcgccggcgccggaactggagccgccggtgttgcggtccagcttccacgggttgcgcgtgagcggatggaagctggacggcgccgcgcccaggaagccgaaatccggcatggtggtcttgccgaccacgattgcgccggcctcgagcaggcgcgccgcggccggcgcatcggccggtgccggcgccagcacggtggcggcgctgccgagcggcaccggcgtgccgcgcgtggcgatgttctccttcagcgtcaccggcacgccgtcgagcgggccgttcggggtgccggccagccagcgcgcctcggcgctgcgcgcggcggccagcgcttgctcggcatgcaccacgtacatcgcacggatgccgggctcccagtgttcgatgcggtccagcaccgactgcatgacttcgaccggggagagttcgcgctggcggtagttgctgagcaggtcggcggcgctgagtgcgtagagcggagtcttcattgtcttttccgagagggttggctggcgcttgggaatctgcatcgccggcgttactgcacaccgaacgggtagtggcgtcccggcgcggcggccagcagcgcgcgggtgtagtcctggcgcggcgacagcacgacgtcgcgcgtggcgccttgctcgaccacgcggcccttgtgcatgacgatcaggcggtcgcacacctggctggccacgcgcaggtcgtgggtgatgaagaggatgccgatggcaagccgctgctggatatcggccagcagcttcaggatctgcgcctgcaccgagacgtccagtgccgacaccgcttcatcggcgatcagcacgcgcggctcgcacgccagcgcgcgggcaatgcagatgcgctggcgctggccgccggagaactcgctcgggtagcggtgcagcgcgtcgggccgcagccgcaccagttccatcagcgactcggcgcgttgccacgcctgcgcgggcgtcgcgccgaaattgaccgcgccttcgacgatggactggcccaccgtgcggcgcggattgagcgagcggttggggtcctggaacaccacctgcaccatgcgccggaacgcggacagctgcgcgcggcgcggcagttgctgcgcggcttcgggcagcacctggatattgcccgcggacggttcgatcagccgcgcgatgcagcgcgccaccgtggacttgcccgagccggactcgcccacgatgccgacggtctcgcccgcccgcacctgcaatgacacatcggtggccgcctcgaccacgcggcgccggcccggccaggctcccgagacataggtcttgccgatgccgctggcgtcgagcagcaacgctcgctgcgccaccgacgggcgctgcgcgggctccagtcccggcacggcattgagcagcatgcgggtgtagtccgcctcgggctggcgcaagacccggtctttcggcccgctttccacctggcggccaagctgcagcaccaccacccggtcggcaatgtcggcgaccacgccgaagtcgtgcgtgatgaacagcaccgcggtctggttctcgtgctgcagttcgcgcaccagtgccaggatctcggcctgcgtggtcacgtccagcgcggtggtgggctcatcgcacaccagcagggccgggcgcaggatcagcgccatggcgatgacgatgcgctggcgctgcccaccggacagctggtgcggataggcgtcgtagatccgctcgggatccggcagccgcacgcgcgcaaagatcgacagcacgcgctcgcgccgctgcgcggcgcccaggctggtgtgctgcgccagcatttcctcgacctgccggccgcagcgcatgaccgggttcagcgcggtcatgggttcctggaacaccatggccacgccggtgccgcgcagttcgcgccggcgtgcgggggtggccgccagcaggtcttcgctggccagcgcgatgctgccgcctgagaccttcaggccttcgggcagcaagcccatcaccgcgcgcgcgaccacggacttgcctgagcccgattcgcccagcaggcagaccacttcgcccggcatgacgtcgaaggaaaccccctggaccgcatgcggccggtcggcgccgggcggcaggtcgatgcgcaggtcgcgcacgcgcaggcagggcgtggccgagtccgcggccgccgactcggtcgtgttcgttggcatcatcaggcactccgcttgctgaacttggggtcgagggtgtcgcgcaggccgtcgccgagcatgttgacggccagcaccgttaccgccaggaaggcgccgggcagcagcacgctgtgcggatgcgcggtgaaatgggcgcgcccctcggccatgatgtttccccaggtggggatgtcggtgggcaggccgatgccgaggaaggacatcaccgcttccaccagcatcgcgccggcgcagataaaggtgccctgcaccagcagcggcgcgatggtgttcggcaggatgtggcgcagcatcagtttccaggtcggcgtatcgagcgcgatggcggcctcgacataaggctcttcacgtaccgacagcaccaccgatcggaccaggcgcgccacgcgcggcgtgtcgggcacggtcatggccacgatcaccgtcagcaggctgggccgccaggcggccaccagcacgatggcgaagaggatgccggggatggccatcatgccgtccatcacgcgcatgatgaagccgtccagccagcgcacatagcccgataccagcccgaccgccagccccagcagcaccgaggccagcgccaccgacaccccgaccgccagcgagacccgcgcgccgtacaacgtgcggctccagatgtcgcggcccaggctgtcggtgcccagcgggaacaggcgttcgaaggcatcgccggccagcgtcacgatctcggcgcgcgtgaagggggccagctggctgctggcggggtccatggtgttgggatcgatggtgtagagccagggcgcggccacggcaaggaacagcatcaggccgaggatggtgccgccggcgcgcacggcaccgttggccagcaccgcgcgcagccgcgagggacgggcgccggtgccgggcggggcggattcgatggcagtggtgagtgaggtcatggggccgggtttccgtgggagatatcagtagcgaatgcggggatcgagcagcagatagctcgcgtccaccagcaggttgatgaccacgtacgagaccgagaagaacagcgtgatgccctggatcagcgggtagtcgcgcgacagcacggcatccactgtgagctggccgacaccgggaatggcgtagatgctctcggtcacgaccacgccgccgatcaggccggccacgctcagcccgatcacggtggcgatcggcaccgcggcattggccagcgcatggcgcgtcagcatgcgccactccggaatgcccttggcgcgcgcggtctgcacgaagtcctcggtcagtgcttcggacacggcggcgcgggtcgtgcgcgccaccagcgcgcacgacatcaccgacagcgtgacgcagggcagggccaggttgcgcagccatggccagatgccgtcggccaggcggctgtagccctgcgacggcagccagcccaggtgcagcgagaacacccagatcatcaggtagccggccacgaagatcggcaccgagaagcccagcacggagccgcccatcaccaggcggtcgagccagcggccgcgccggtaggccgccagcgtgcccagcggcaccgccgtcagcacggtcagcacgatggtcagcgccgccaccgagagcgtgggctccagccgctgcgcgatcagcgtggtcacgggcatcttgtagaagaaggaatagcccaggtcgccgcccagcacgtggccgagccagccgatgaactggcgcggcagcgcttgatccagcccgagctgggtgcggatgcgggcgatgtcttccacgctggcggcgtcgccggcaatggccgctgccgggtcgccgggggtcagccgcagcagcgtgaagacgatgacagccaccaccgccagcactggcacggtggccaggctgcggcggaccaggaaattcatcatggcactacctcgttgggggaaagggaggtcagcaggctggcggcacggcagccgggaccgcgggcgccgtagcgggctattgcttgcgcacgttccagtacagcaccgccggtgccggcagcaggccgctgatcgcaccgctgcgcaccacggtgggcgccttgccttcgccgacgggcgccaggatgccgttttcgatggcgcgcagctggatcctggtggcgatgtccttgcgctgcgcggcgtccgcggtttcgatgaagcgggtcttgagggtttccagctcggcgtcttccggccagccgaagtagccgcggtcgccgttgccggtcagcgggctgtaggtgatggggctgctggcgtcgacgccgccccagaaggtgatgtaggcattccagccgcctttctcgggcggttccttcctggtgcggcgcgtgatcagggtgctccagtcggtggcctgcacgtcgacattgaagcccacctgcctgagcagctggccgtagaccaccggcaggcggctcagcgcgggggcatcgcccggcagcatgatcaccactggcttgccgtcatagccggactccttgagcagcttgcgcgcctgttcgaactgcggcttgccggtgaagaagccggtctggtcgctggcatagggcgagccgcacaggtagatcgaggcgcacggcttgtagaagtcgcggtaggtggcctgcgcgcgcagcatcgcttcctggttgatcgccagcatcgcggccttgcgcaccctggcgtcattgaacggcggcaccttgtggttgtagatcacggtgaaggggccggcgggcatgatgtcgaccatctgcacccgcttgtcggtgcgcagttgcggatagtgcgatgacggcacgacctcgaggatatccacctcgccgttgagcagcgcgtttacctgggtctgcgtatcgcgcaggaacacccattcgacgcggtcgacgtgcacggccttgccgccggccaggccggacggcgcatccttgcgcggcacatagtcgggattgcgacggtagaccacgcggtcgccgggccggaagtcctctttcttcagcgtgaaggggccggagccggtcaggtcgtcgatctgcttgtcggcaggcgtctcggcgacacgcttgggcatgatgaacggcaccagcgggctgggcttgcccagcgcatccagcactgcgccgaagggctggcggaaagtcatgcgcaccgtggccgggccttcggcagtgatgctggccatggcttcatacatgcgctggcccagcacgtcgcgcttgccccagcgcgccagcgaggcgattacgtcctgcgcggtgaccggcgtgccgtcatggaacttgagccctggccgcagcgtgaaggtccaggtcttgttgtcggcgctggtgctggtcttgtccaccatctgcggccggatcacgcccttctcgtccatgccgaacagggtgtcgtagatcatgaggccatggttgcgcgtgatgttcgcggtggtccagaccgggtccaggatcttcaggtcggacgacggcacggtgcgcagcacggtctcggcgattgcgctgccggcggacatgcatgccagggcgcacaacgcgacggcaccggcacggcgaagcgggattgcagacatcatggtcatcatctctcgggggcggggtggggggacaaagggcgccggtcagggcgtggtggtgccgcgctcgcgcagcttctggagataccgctcgaaggactcgcgcgaagcggcctcggcttcgatcagcttgaccagcgtggcgcgcagcgcgtcgatctcggccggcgtcaggcagtgcaggaagcccgcttccagctcgatgccgagcggctcggcgcgccgcaccaggtcgacgccggcctcgctcaggaacaggcacacctggcgcgcgtcttccgtgctgatctcgcgctgcaccaggtcgcgcttgaccagcgcgccaaccagcttggacgccagcgtcttctcgatcgcagactgctgcaccagctggcccatggtgatgccgggcgccgatccgatcatccgcagcaggcggatgtcccgcagcgagaccccgaatttctcttcatacacgcgcgagccgcgttcgcgcgtgcgctcggcggccatgtcgagcaggatgttgatgtagtcggacttgagccggagagcgcgtggcatgaatagatgaaaaattcgatagttgaaaatttcaacgaataatagtgaccggcgagggggctgggccatgagggatttcccggggtagggcaatgcggcgctgcgccatgcctggcaggacttggcccgcgccgcgcgggaatcacgccgggcggggtgctggcctagactgcgttggcatccctcgcgcaccgcactcccgcgggcaccacagaagggagccaggacaggagacacaccgatgcaacaccgttccgcacggctgcgcgcagccgtggccgccatgctgctggcggccatcccggcggcagtctgcgccgccgatcccgcctccgccgagccctatccgtcgcgcccgctcaccatcgtggtgccgtcggtggcgggcaatgtgaacgacgccgtggcgcggctgatcgggcaggaactgaccaggagctggggccagccggtcatcgtcgacaacaagcctggcgcgggcaccaccacgggtaccaagtacgttgcccgcgcagcaaaggacggttacaccgcgctgttgaccttcactgcgcacgtgcagaacccgtcgctgtaccggggtatcggctatgacccgatcgcggacttcacgccggtcagcgaggtggcgatctcgtccaccatcctggcggtgtcgccggacttcccggcgcgcacgctgccggaggtggtggcgctgctcaaggccaatcccggcaagtatccgtacgggtcgtatggcgcggggacgaccggccatatcctgggagagttgctcaagcgcgaggccgggctgcagatggaacacgtcgcctacaagggcggcgcgccgctggccaccgacctggcggccggccatgtgaagctgggctttattgccgtgggcacggccatgccgctgctgcagggcggcaagctggcgccggtggcgatcgctggcgcggagcgttcggcgctgctgcccaaggtgccgaccttccgggaggccggctacaagggcttcgagcccgatgcgtggatgggcctgctgttccccgccggcgtgccgaaagcacgggtcgatgccctgtcgcgcgaggtcgcgcgcatcgtgcgcctgccggaaatcgcgaagaagatgcaggacctgaatctggtgccggtcggcagcacgccggaagccttcgccacggtgatgaagaacgaccgcgacaaatggagccgcatcatcagcgatgtcggcatcacgctcgaatgacaggagtcccgatgcaagagaccgattacctggggctggtctgctcccgctggtgccactggagcgagctggaactgcaacgcctgccgcgccagccgctggcgccgggccaggtgcgcatccgtgtgcgccatgccggcgtgggctttgcgctgagcctgtttgtgtccggcaagtaccagcgcaagccgccgctgccgttcatccccggcaccgaggccgcgggcgaaatcatcgaggtggcgcctgatgtcacgcggctgcgcccgggccagcgcgtggccgcggcgctggactggggcggcttcgccgaggaagcggtggccatggccgacacggtctatccggtgcctgacgggctggagctggcccaggcggcggcgctgcccatcacctatggcacggtctgggcggcgctggcctggcgcgccgcgctgcagccgggcgaaaccatgctggtccatggcgccagcggcgcgctgggcacggccgcggtacaggtgggccggttgatgggcgcgcgcgtgatcgccaccgccagcaccgaggccaagcgcgaggcggcgctgcgcaacggcgccgcgcatgcgctgccgtccgacgcggccacgctggcggcagcggtcaaggcgctgtgccccgcgggcggggccgacgtggtgttcgatccggtcggcggcgatctcttcgacgcctcgctgcgctgcgcggcgccgggcgcgcggctgctgtcgatcggctatgccagcgggcgcatcccggaggtgccggccaacctgctgctggtgaagaacctgaccctgatcggcttcaactacggctactacatcggctggggcctgaccgacgagcgccggcgctttgcgcagccggtgcaggcgatggtggccgagatcatgcaggcggcagccagcggcaagctggcgccgcccgtgctgcagcacttcccactgagcgattggctcagcgccgtcgacaccacgatgtcgcgccgcgccatcggcaagatcatgctggatatctgaacggagggcacgacatgcaccatgcacaagcggcaacggacgatgccatgttcgacggcctgaccgtgctcgacctgagccagggcatcgccggcccgtactgcggcctgatcctgcgccagcagggcgcgcgcgtggtcaaggtggagccgccgggaggcgactggtcgcggcagatgggacgcatccgcgccggccagaccgcgatcgcggtcgcctgcaacgcgggcaaggagagcgtgctgctggacgcgcgcagcgacagcggccgggccgccatcgccaggctggcgcagcaggccgacgtggtgatccagaacttccgccccggcgtggccgagcgcatgggcgtcggctacgaggcgctggccgcgcgcaacccggcgctggtctatgtctcgatctctggctacggccatgccggcccgatggcgaacatgccagcggtggacaccaccatgcaggccttcagcggcctgatgcacctgaaccgcgacagcgccggccagccgcgccgcatcgccttctacatggtcgacctgagcaccgggctctatgcggcccagcatgcgtcggcagcgctgtacaaggccgcgcgcaacggccgcggccggcacgtgcggctgtcgctgctggagaccagtgccgcgctgcagtcctacctgatggtggatgacgccatgttccccgatgcggaactggccgtggccaatgcgcccaccgggctgttcgatgcggccgatggccggctgtacctgagcatgctcaacgacgccatgttcgtgcggctggcaacgctgctgggtttcgacgactggctggccgatatcacgctgcacaccagcgccggccgtctgccgcgcgcggcggagctgggccggcgcgtggcgcaggcgattgcagcacagccgctgtcgcattgggaggcgctgctgaccgagcacgatgtgctgttcgcgcgcgtgggccatgcacgggacctgccgcagagcgcgcaatgcgcgcaggcgggcgtgttcggccggctgccgctggctgggatcggcgaagtgccgtgggccaacctgccaggcatggcaggatcggaacggccggcagggaatgcgccggcgctgggccagcataccgaagcggtgctggcggagttcggcatcggcacctgaaagcggcgccggaaaagaaaaacggacggtgcgcaatgcgtaccgtccgtgttccgttgtgcgttggtaggctcgattggactcgaaccaacgacccccaccatgtcaaggtggtgctctaaccagctgagctacgagcctagcgaaggcgcgaattatagagacgcctttttgattgcgcaagcatcctcgccaactttttgtgtggatgcttgcgcttgtgccgtgcgcggcgcgtcaggcgccggtgatgcggtcgcgcagttcgcgcttgagcaccttgccgatggcgctgcgcggcaggctctccacctcatggatcgcggccagccgctgggtcttgcccaggtgctggttggcccaggccagcacgtcctgtgccgtggcgccgccgccggcgcgcagcgcgacgaaggccaccggggtctcgccccagcgctccgacggcacgcccaccaccgacacatcggccaccgccgggtgttcgcgcaccaccgcctcgagatcgctcgggtagatgttgaagccgcccgagatgatcatgtccttcttgcggtccatcagcaccaggaagccgtcttcgtcaaagcggccgatgtcgccggtgcggataaagcgctggccctgcgcgtcgtgccactcggtctcggcggtcttttccggctggttgtggtagccgttcatcatcgccgccgagcggcccaccacttccccggtgctgccgggcggcagttcgcggccctcgtcgtcgatgatgcgcacgtcggcaccggtggcggggcgccccacggtatgcagcttatcggggaactggtcggcgaacagcaggcagccgccgccgccttcggtcatgccgtacagctcggtcagcgcgcccggccagcgccgcagcacttcggccttcagggcggggctgaacggcgcgctggtgcagaacttctgctggaaggacgacaggtcatggcggtcgaactccggatgcgccagcagccgctggtactgcaccggcaccagcatggtgtgcgtggcgcgatgctgctgcgccagcgccaggtactggcccgcatcgaacttggccatcaggatcgccgtgccgcccagaccgatggtcgggaagaagctggccagcgtggtgttggaatacagcggcgtcgacagcagcgtgatcgcatgcgtgccgtagccggtggcggcgccgcgcgacacatgggcccagcgcatgccgtgcgactgcacgatgcccttgggggtgccggtggtgcccgaggaatagatgatgttgagcggcatctccgggcggatcccgggctcggtcaccggtgtgccggcgggtgccagccaggcctggtatggctggcctgcgtcgctgccgtccagcgtgacgatgggcgtggcggccagctggtcgcgcacgggctgcagcacgtcggccacggtggcatccgtgaacaggatgcgcgcggccgcgtcggcaaccatgccggccaggctgtccggcgtggatgacggtgccagcggcgccacgaccacgcctgcgcgcaccgcgcccaggtacaccgcggcgtattcgatcgaggacgacgcgcagatggcgatggcctcgccggggcgcacgccgtcgcgggccagcgccgcggcaatgcggtccatggcggcatcgaggccggcatagtcgagcacgcgctcgccatgcatcagggcgcgctgcgtggggcgctgcgtggcgtgctcgcgcacgagcacggacatggtggtaaaggggcgttggagcggggtcggttgggtcatgttcggcaagggaatgcggacgccggcctggcggcgcccgatgagcaatgatggatcgaagcagtcttactggatctgtgcgccggagtccttcaccaccttgctccagcggttgatctcggcgtcgatatgggtgcgcagcgcggcgggagtcgagcccaccggctcatagccgttggcggccagcgtcgccttcagttcgggctggcgcagcaccgtggcaatctcggtgctgagccggtcgatcacgggctgcggcgtgccggccggtgccagcatcgcgtaccagccggtgatgctgatgcccggcacgccggcctcggccagcgtcggcacctcgggcgcgaccgcggcgcgctggctgccggtcacggccagtgcgcgcagcttgccgctcttcacatgcggcagggtggtggagatgctgtcgaaggtcagctggacctcgcccgacagcattgccgtcaccacttgtgcgctgcctttgtacggaacgtgggtcatcttgatacccgcgacggaatcgaacaattcgcccgccaggtggccggtattgccgttgccggccgaggcgaaggtcagcttgccgggcgcggccttggcctcggcaatcagctccttcacgttggtggcctgcagcgaggggctcccggccaggatcatcggcaggctggccaccagcgagacgggcgcgaagtccttgcgcgtgtcatagggcagcttcgggtacaggctggcattgatggcatgggcggccagcaccatgatcagggtgtagccgtcgggcttggcccgcgccagcgcctggctggcgatggtgccgccggcgccgggccggtagtccagcaccacgggctggcccaggcgctcctgcagcctggctgcgaccgggcgggccagcaggtcggcgctgccgcccggcgggtaggggatcagcagctggaccgggcgcgatggccaggtctcggcgctggcgccggacggcaaggcggttgcggccgcggtggccagcatgccggccagccatgcgcggcggacccaggcgcggcgccgggatgcgatcagggatgccatcagcttgtctcctcgttatgccggccgcgggcgcagccgttgtcccttgtcgccaggtcgggccgggatgttggtgtcacaaacggtaaaggtgtaagcgcgccagcggaattcttaaatcgataagtctggctttttgcaagcgaagcgataggcggcaccggtgcgaatggctgtatctggcggtcggctacagcaataatctttgcgaatgaggagattttgccagtcggctgtgttcagaggcttgaatcttcgcaatcagggagatttcttgatttcgccgcctggaaacactaaagtctttgcaatcaaggagatttttgtgccagtgaccctcaccgaacccggcgatatcggcgccttcgtgcgcgctgcccgcaaggcgcaaggcctgcgccaggacgatgccgcaggcgccatcggcgtcagcgagaacttcatggtgcgcgtagagaacggggccgaaggcatccagtggggcaagctgttccaggtgctggaagggcttggcctgcgcgtggtggtggatatgccggaggcagcggccccgctggtagcgcctgaactcgccaagctcaggcaacgccaggcgcgcagccgcaaccggcgcgcagcggtcaagggaggcgaccagcatggctgagcgcgtactggtcgccagcatcaacggagcgccggtcggcgagctgcatgaagccagcgatgcctggtcattccgctatgacgcggagtggctgggcaacccgcacgccttcgccctgagcccggcgctgccgctgcagcgggaggcgctcgccgatggcagcacgctgcggccggtgcagtggtacttcgacaacctgctgcccgaggacggccagcgtgcgctgctggcacgcgatgccagcatccgcaacgaggccgatgcctttgccctgctggcccactatggggcggaatcggcgggctcgctgacgctgctgccgcccggccgcgggcccgccaccgcgccggccctgcgcgccttgagcgatgccgcgctcgacgcccgcatccacagtctgcccagcgtgccgctcacgcatggcgcggtcaagcgcatgtcgctggccggtgcccagcacaagctggcggtggtgctgcgggacggcgcgctgttcgagcccggcgcggatacgccgtccacgcatatcctgaagccgacccaccagatgcaggagatctatccgcattcggtcatcaacgagtggttcgtgatgtcgctggccgcgcggctgaagctggaggtgccgcccgtgcaccggcgctatgtgccgtcgccggtctacctgatcgaccgtttcgatcgccatctcacgcagcaagggcagtggcagcggctgcatgcgatcgatgcctgccagctgctgaacctgccgcgcaccttcaaatacgaccagggcagcgtcgagcggctggcgcaactggcaacgctgtgccgcgccccggcggtggcgcgggcacggttgttcgactggctggtgttcaacatcctggtgggcaattcggacgcgcacctgaagaacctgagcttcctggtgtccgatgccggcattgcgctggcgccgttctacgatttgctcagcgaggcggcttacgccacccgcacctatgacaagaccggctggccgcaggcgcaccgctttgcctggccggtgctgggggtggagttctacagcgatttctcgcgcgcgctggtgctggaggcagggcgcgcgctgggcctgaccggcgtgaccgccgagcggcggctggacgccatgctgcgcggcatcgggccggccgcgcaggcgctctatgagcaggccgagcaacagaacgcggccatggcgcgggagcgcccggtgctcaccggcgggtttgccggcgaactggcctgcctgcgcgtgatccgtttcaccatcatcgccgacatggtcagggcgcttgccgcagcctgagtctggctaatgactggtgggatgcggctggctgaagaagtagggcaccagcgcggcggcaatcagcaggcccgcggacaggaagatcgccgcataggtggaaggcagcggccagccgcgcacatggccggcattggcgatcagcccgtagccccatgacgtcagcgccgatcccaggaacacaaaggtgttgagcagccccagcccgcgcccgcgccgcgacggcgtgatcagcccgcggccctgcgccatcaccagcgggtgcagcatgccgatggtcgacagcagcgccattatcgccacgccgtagccgatgccgctgtccggccatagcgccagcaggaacgagcccgacatggcaaagcacgaccagccggcgatggcggtcttgagcgtgttgcggcggaccagcaccggcagcaggaaggcggtcaggaagccggccaggctcagcagcgccagcgccactccgcgcggcgccgagcccagcccgaacacgtcggccaggtaggggccgctccaggcattgcggaaggcggtgccggcggacatcgccacgcacagcggaatcagcgtccacagcggcgccagcttcagcagctgcaggctttccgacagcatcgccggccacgacgcgctgcgggcctcggcatggccctggtcgcgcacgaagcgccacacaccatagcaggccgcgaccatgcccagcgccgataccgccatcgacgggcgccatccgatcagcgagatggcccagcccagcggcgccgtggcacacagcgcgccgatcatgcccatggcattggagcggctgaccacgcgggtgtagtcgcgctcggacagctgctcggaggcgaaatgcagcaggcccatgaagaccggcgcgcatgccagccccagccctacctgcgccagcgtggccgccgcgccgtttggcgccagcacgaacaggatcgacgacaccgcgcccaccgccagcagcagcgcggtcggccggcccacgccgtagcggtcgaaggcaatgcccaccgggatctgcgtcacggcaaaggccaggaagaacgacgaagacagtgcgccaaagcccgccggcgacagcccgaaatcatgctgcagttcgggcgccatcaccgccaggcaggagcggaagaactggctgagcgcaaaggcgaacgtcagcagggcgataccgcgcgcggcgtgcgctgccggggcatgggcgggcagggcgtcgggcgatgcggggaggcgggtgttgctgggggtcacggcttcaacagcggcctgctcgggccgcgtagtctcggtactgcgcgatctcggccgctaccagcgggcgcagggtttgccactgcaccggctgcggagcgaacacgctgttgttgttatcggaggaaatgcacaggcgcacctgcgcgacgtggccggcggcatcggtgcgtacgtgcaggatgcgggtcgaccgcggtggctgccaggtgatgggcggcaggaagtaggtcctgccgctgccccgctcggacgggtcggtgacaagaccgaacgtggtgcctagcagtgagtgtagagcgtgcgcggtcagcatggtcggcgcgtggccggtgttcgcccagattgcatggcaggcgagccggcctgcctgtccactcagcccggcagggcgtcgtaggtcagcaggaatacctgctcatcccccgcactgaccggcagccagacgatttccagttcagggaacgcggcttccacgttggcgtgctcgttgccgatctctaccaccagcacgccgcccggattcaggtgcgccttggcgccggcgatgatccggcgcaccacgtccatgccgtcgtcgccgccggccagggcgatgcgcggctcggccaggtattccggcggcagcgcctgcatcgagccttcgttgacgtagggcgggttggtcaggatcacgtcgtaggtggcgccgtgcggcagcggcgcgtacaggtcgccttcatacagccggatgcggtcgtccatcttgtagtcggccacgttgcggcgcgccacggcgagcgcgtcgggcgagatgtcgacggcgtcgatcttcgcgttcggccacacgtgcgcggccacgatcggcaggcagccggaaccggtgcacagctccagcaccgggccgatgctgtcggtctcgccgacccagggctccagcccgtcctgcagcagttcgccgataaagctgcgcggcacgatcacgcgtgaatcgacgtagaagcgcaggccgtgcataaaggcctcgtgcgtgatgtaggcggccggcacgcgctcattgacgcggcgctcgatgaccttgagcacggtatcgacttcctcgggcagcaggcgcgcgtccaggaagggatcgagcgtgtcgagcggcaggttcagcgtatgcagcaccaggtaggcggcttcgtcataggcattggcgctgccgtggccaaaggacaggcgcgcggcggtaaagcgcgagactgcgagacgcagcaggtcgcgcacggtgcgcaggggagagggcgttgccatgtatgggtgtcttccggcgaaaaaatcaggcgacgagacgttccagcacgccgcggtaaacgttcttcagcggctcgatgaagcgcacttcaacgtgctcgtcgatcttgtggatgctggcgttgggcggcccgaactcgatcacctgcgggcagatcttggcgataaagcgcccgtccgaggtgccgccggtggtcgacagctcggtcttgacgccggtctcggcctcgatcgccgacgacagcgcgtcggacagctcgccgcgcggggtcaggaagggctcgccgcccagggtccagtccagcgcgtattcgagctggtggcggtccaggatcgcatgcacgcgcgccttcaggccttcgggcgtgctggcggtcgagaagcggaagttgaagtcgatggtgacgtggcccgggatcacgttggtggcgccggtgccgccgtggatgttcgacatctgccagctggtcggcgggaagtactcgttgccctggtcccagacctcggcggccagctcggccagcgccggcgcggcttcatggatcgggttgcggcccaggtgcgggtaggcgatatggcactgaatgcccttgaccgtgagcttgcccgagagcgagccgcggcggccgttcttgaccatgtcgccgagcgtgtcgaccgaggtcggctcgccgatcacgcagtagtccaggcgctcgccgcgtgcggacagggcctcgaccaccttgatggtgccgtcgtgcgccgggccttcctcgtcgctggtgatcaggaaggcgatcgagccggcatgcgcaggatgcgccttgacgaactcttccaccgccaccacgaagccggcgatggaggtcttcatgtcggcggcgccgcggccgtacagcttgccgtcgcggtgcgtcggcgcgaacgggtccgaatgccactgctccagcgggccggtcggcaccacgtcggtatggccggcaaagaccagcagcttgccgtccttgccctgcgtgccgcgcctgaccgcccacaggttggtcacgcggaaatcgtcggggccgctgacgagcgcttcgcagtcgaagccgagcgccttcaggcgggtttccaggatggcctggcagccttcgtcggcgggcgtgacggagcggcggcggatcaggtcttcggtgagggcgagggtggcggtcatcggactacggaaatggaaatcagaactggccggcgtactggtcggcggagaagccgaccatcaccttgccatcgtgggccagcaccgggcgcttgatcagcgacgggctttgctgcatcaaggcgatcgcgccggcttcctgctcggcgcgggccttgtcggcgtccgacagcgtgcgccaggtggtgcccttgcggttgagcagcgtggccagcggcacatgcttcagccagccgcgcagcatggcttcatccacgccctgcttcttgaagtcgtggaaggtgtaggccacgccgttggcatccagccaggtgcgggctttcttgacggtatcgcagttgggtatgccgtagagcaggacggtcatggctagtcttgatggattggattcagcggaacagcaggttcagcgcgatcaccaggccgcccaggcccagcgccacgccgcccatggccaccgcggtcatcaggcgcaggcggcggtccagccgggcggcttccttgcgcagcgcgtcgatggtgatggcatgttgctcggccagcagcttgacggcctcggcctgctgcacggcagcggcttccagctcggcgatgcgggcggcgggatcgcgcgtgtcggccaccgcgccttccggcgtgccgtccttgcgcttgttcttcttcagtttctcgatggtcttgttggcctgctcgagaatggtgggcagcagggagagcacggtactgacggtggtgggatccagggccatgagtcgcttgcggagggaaggcatgttcagcctggccaggcggggtgacaacggaaatactgccccggggccgggccccgggacggggcggcgcagccgttgcgggctgcgccaggcgtgctcagtcgccgcgcagcaggtcgttcaggctggtcttggcgcgggtctgcgcgtcgaccttcttcacgatcacggcgcagtacaggctgtacttgccatccttggacggcaggttgcccgccaccaccaccgagccggccggcacgcggccatagtggatctcgccggtttcgcgatcgtagatcttggtcgactggcccaggtacacgcccatcgagatcaccgagttctcttccacgatcacgccttcaaccacttccgagcgcgcgccgataaagcagttgtcttcgatgatcaccgggttggcctgcagcggctccagcacgccgccgatgcccacgccgcccgacaggtggacgttcttgccgatctgtgcgcacgaaccgaccgtggcccaggtgtcgaccatggtgccttcgtcgacgtaggcgccgatattgacgtacgacggcatcagcaccgcgttcttggcgatgaacgagccacggcgggccacggccggcggcaccacgcggaagccggccttggcgaagtcgtctgcgctccagttggcgaacttggtcggcaccttgtcgtagaactgggcaaagccgccggcgctcatcggcgcgttgtcttccaggcggaacgacagcagcacggccttcttgatccactggttgacgatccagtccttgccttgcttctcggccacgcgcagcgcgccggaatccagctggctgatgacgttggcgacggcctcgcggatgtcgttgggggcggacttgggcgacaggctggtgcggtcttcccaggcctggtcgatcagggcttgcagagcttgcgtcatgttcgttttctcaggtgttgaatgttgatgttcggccaattgtgttctccctctcccctcagcgggagagggtcggggagaggggtggtctagcaaggcaccacgctggtagaaccgcctgccctctcccccggcccctctgccgcaagcgggagaggggagcaaaccagtggtcaaggccaaagcctcaggccagcgatttgcagaattccacgatccggcgcgcaccttccaggcattcctccggcgtcgccaccagcgccatgcgcacgcggtttgcccccgggttaatgccgtcggcttcgcgcgccaggtagctgccgggcagcacggtcacgttctgctcggccagcaggcgcgcggcgaattcggtatcggtgaggccggtgcgcgagacatcggcccacaggtagaagcctgcatcgggcagcgccacgtccagcacctcagccagcatcggcgtgacttcgctgaacttgcgcacgtaggcggcgcggttctcgcgcacatgcgattcatcgttccaggcggcgatgctggcgctctgcaccgccgggttcatggcgccgccgtggtaggtacggtatagcaggaatttcttcagcagcgcggcgtcgccggcgacgaagcccgagcgcaggcccggcacgttggagcgcttggacaggctcgagaacatcaccagccggtcaaggccgcggcccagcttgtgcgcggcttccagcgcacccagcggggcgcggccctcgtcgaaatagatctccgagtagcactcgtccgaggcgatcacaaagccgtagcggtccgacagcgcaaacagctgcttccagtcttccagcgacagcaccgcgccggtcgggttgccgggcgtgcacacaaatagcagttgcaccttctgccagacctcgtcggcgatgcggtcgaaggccggggcgaagttgcgcgccgggtcgctgttggcgaacaccggggtggcgccggccagcagcgccgcgccttcgtagatctggtagaacgggttggggcacagcaccagcgcgcccgcgcgggtgccgtcgaccacggtctgggcaaaggcgaacagcgcctcgcgcgagccggtcaccggcagcacttcggtggtggcgttgaccttgggcaggccgtagcggcgttccagccagctggcgatgcactgccgtagtgcatcggaacctgccgttgtgggataattcgccagccccgcgagcgactctgccagcgcttgcttgatgaattcaggcgtcggatgcttgggctcaccgatgccaaagctgatggccggcttgtcggcaggctttacctgcgcaaagagcacccgcagtttctcgaacgggtagggctggagcaggtcgaggcgcggattcacagtgtcagtcggggccggttaaaacgacgcattatagaggaacggcgcgggtttccgtgcgccggcccggcccgcgcggccggccacgagcacggatggcgggcatcacgccctggtgatgccgccggcgccgtccggaccctgcctgcctgtcaccggtcggcggcccggctcgcctcgctttgatcccctttatgagcacaaatactgttgcggcgcagcatgcgccggccgaccgccatgcggtcaaggcatcgctttccatcctgatcggcgcctcggtctggggcatcgcctggttcccgtaccgcgtgctggcgggctggggtctgggcggcatgcacgccgcggcgctggtgagctcggtcgcggcggtgctgtcgctgctggtcttccgccggcacctggccggcctgcgcccgcacttgctgttcgtcgcgatcgggctggcggcgggcgtgaccaacgccggcttcgtctggggcagcgtcaacggccatgtgatgcgcgtgctgctgctgttctacctgaccccggtctggaccgcgctgtttgcccggctgttcctgggcgagcggctgtcggcggcggggctgtcgctggtggcgctggccctgttcggcgccgggctgatgctgtggacgcccgaggtcggcgtgccgctgccgggctccgccgccgaatggtcgggcctgatcggcggcatgggctttgccgtcaacaatgtgctgtcgcgccgcgccggccagcgcttcccggacatggacgcacgcgtgcgcacggtggtggtctatctgggctgcacggtggtgggcgtgccggccgcgctgctgctcgatggcccgtcggtggccatcgtcgcgggcgcgcaggtcagcgtgggcatgctggtgctgggcctggcggcggtgctggtggtcagcaactcggtggtgcaatacgggctgcagcggctgccggccaaccgcgtgtcgctgctgatgctgttcgaaatcgtgatcgcagcgctgtcctcgtggtggttggcgaccgaggtgctgagctggaaggaagcggccggcggcctgtgcatcatcgccgccggcgctttgtcgggactggtgcaccggagccgcgcgccagcgccggccgcagcgggcgccgaggcagcggcatgtcactgactgagccggcgggcgcttcagtgcagcatgacccgcgacaccattgccaccaggggcgtccgtaccgcgcgctcgacgccgcggtgcaagtgcagcggccgcagcagcatcttcacggtcatttcgatggggatgttgcgccggatcaccccggacacgcgcgcattgagcgcgcgcacctcggcttctgacaccgcttccacaccgcgctccatgcgcagcacattgcgcagcgcgatcgcggcgtcctcgttcttgatctccagcagccggcgcgccagcgcacccagcacgcgcagccggcccagccgctcggatgccgcaaagcggttgaagtactggtagaagtgcttgtagtgccgcacctcgtcgttggagatgcgccgcgtcaggtcgcgcagcaccggttcgtcgctggcctgttccagcgcgcggtagtaggcggcggtgccggtttccaccacgcagcgggccgccatttccaggccctcggtcggctcgaactggtcgatcgagcaggtcttgctgtactcgtcgaagaagcgtgcatagccgcgctcccagtcgaattccggccagacatgctcgacatagcgccgcagcgccagcccgtgctgcagttcctcggcttcccagtgctcggcaagccagtcggccgcgtcgggcacacgggcgtaataggtggcaaggttgcctgcataggtgtcggatccgctctcgatgaacgaggccgacaccaacaggtagaagagatcgcggtcgccgcgtacgcgttccacgtcgatcgcctggtagttgatgtcgctgacagaccacggccgggcggccgttgacggttcactcatgctctgtcctcctggttggccaaaggctgcgaggggcgttcacgggcgtttggctcggagcgcatccggagtcacgccgacagatcagagactagcatttaccctaattagtttcccggcgattggccggcaacgctggctgacagcgcccacggcgcctgccaaagtgcttgcggaaacgcttgtaaggggcggaatagcaagggaaatcggccatgggatatgacgccggggcgactgccaaacgggccggcgaaggcatctgcgatggtatgattagccccaattctcgggcccgaggggtattttgaggtgctggcgtcacgccgcgccggctcccgcgcagcccggctttctgaacagtgcaatagccccgataccaggccgacccggttccgataccggagtggccgataccacacgagaaaccgtgcgactatcctcgatcaagctggcgggcttcaagtcatttgtcgatcccaccaattttcaagtgcccggccaactggtcggcatcgtaggtcccaacggctgcggcaaatcgaacatcatcgatgcggtgcgctgggtgctgggcgagtcacgtgcgtcagagctgcgtggcgaatccatgcaggacgtcatcttcaacggctccaccgcgcgcaagcaggccggccgggcgagtgtcgaactggtgttcgacaatgccgagggccgcgccgccggccagtggagccagtacgccgaagtcgcggtaaagcgcgtgctgacccgcgacggcacttcgtcctactacatcaacaaccagccggtgcgccggcgcgacatccaggacatcttcctgggcacgggcctgggcccgcgcgcctacgccatcatcgggcagggcatgatctcgcgcatcatcgaggccaagcccgatgacatgcgcatcttcctggaagaagccgcgggcgtgtccaagtacaaggaacgccgccgcgaaaccgaaaaccgcctgtccgacacgcgcgagaacctgacccgcgtggaggacatcctgcgcgaactcggcagcaacctcgaaaaactggaaggccaggccgaggtggcgcaacgcttcaagacgctgcatgccgacggcgaagaaaagcagcacctgctgtggctgctgcgcaagcgcgaggcccagcaagagcaggaacgccaccagcgcgccatcgagcaggcccagatcgacctggaagcgcagaccgcgcagctgcgccatgtcgaagccgagctcgaaaccatgcgcgccgcgcattacgcggcgtccgatggcatgcacgccgcgcagggcgcgctgtatgaggccaacgccgaagttagcaagctcgaagccgagatccgctacgtggtggaatcgcgcaatcgcgtgcaggcccagatcgccgcgctgaccgggcagcgcgagcagtggcagggcaaggccgaacaggccaccgacgagctggcgcaggccgaagaaaacctggccgtggccgaaggccgcacggtcgaggcgcaggaagccgtcgcccacaagaacgacgaactgccgacgctggaagggcaatggcgcgacgcccagcaactgctcaacgagcagcgcgccggcatcatgcaggccgagcaggccctgaagctcgaagccgcgcagcagcgcagcgccgaccagatgctgcagcagctggaacagcgccgcgaacgcctgtcggcggaagaaaagggcctggaccgtcccgacgagacccgcctggagcaggcccgcgccgagctggccgagcaggaagcgctggtcgaggaagcccaggccgtgctggccgacgccgaagagagcgtgccgcgcctggacgaagcgcgccgcgccgcgcaggcgcgcgtgcacagcgaagcctccgcaatcgccacgctggaggcgcgcttgtcggcgctgcgccagctgcaggagaacgtgcagaccgacggcaaggtgcagccgtggctggccaggcatgagctggccgagctgccccgcctgtggaagaaggtccatatcgagccgggctgggaaaacgcgctcgaatccgtgctgcgcgagaagctggccgcgctggaagtgtcgaacctggactgggtcaaggccttcctgtccgacgcgccgccggccaagctggcgttttactcgccgccggccgccgcccgtccgctggaaacgcctgccggcctgcgcccgctgatgtcgctggtccagatcactgagccgggcatccgcgccgtgatgcaggactggctggccgatatctatgtcgccaccgacatggcgcaggcgctggccgcacgcaacacgctgcctgacggcgcgtcgttcgtcgtggccgagggccacctggtgggccgcaacgccatccagatctacgccgccgattccgagcaggccggcatgctggcgcgcgagcaggagatcgaaaatctgcagaagcaggcgcgcgcgcagctgctgctgtccgacgaagccaagacccaggcggtgcgtgccgaagcggcctacacccaggccagccaggggctcggcgatgcccgcgcgcgcgccgagcaggctacccgccgcgtgcacgcgttgcagatggacgtgctcaagctgtcgcaggcgatggagcgctactccgcccgcagcggccagatccgcgaggagctggacgaaatccacgcgcagatcgaggaacaacgcgccatccgggccgaatccgaagccagcttcgagcagcatgacgccgcgctggcagagatgcaggccactcacgaagaccagcaaatggccttcgaggcgctggacagcaagctctcgggcgcgcgccaccagctgcgtgatttcgagcgcgccgcacaggaagccctctttgccgagcgcaacctggccagccgcatcgacgagctgcgccgcaatatccaggtggccgccgaccaggccgaacgcatcgccgaatcgctggaaaacgcccgcgccgagctggagaccatcaacgagcagaccgcgcataccggcctgcaggaagcgctggagcgccgcgccgagaaggaagaaaagctcaccatcgcgcgcaccgaactcgatgcgctgtcggcgcaattgcgccagcacgacgagcagcgcctggccgccgagcgcagcctgcagccgctgcgcgaccgcatcaccgagctgcagctcaaggaacaggccgcgcgcctgaaccaggagcagttcagcgagcagctgaccgcggccgaagtggacgaggccgcgctggccgacaagctgaccggcgatctgaagccgtcatacctgcagggcgaagtcacgcgcatcaacaacgccatcaacgcgctgggcccggtcaacatggccgcgctcgatgaactggcggcggcgcgcgaacgcaagaccttcctcgatgcgcagtcggccgacctgaacgacgccatcaatacgctggaagacgcgatcgccaaaatcgaccaggaaacccgcgcgctgctgcagggcaccttcgaccaggtcaaccatcatttcggcgagctgttcccgtcgctgttcggcggcggccaggcgcgcctgatcatgaccggcgaggaaatcctcgacgccggcgtgcaggtgatggcgcagcccccgggcaagaagaactcgaccatccacctgctgtcgggcggcgagaaggcgctgaccgcgattgcgctggtgtttgccatgttccagctcaacccggcaccgttctgcctgctggacgaggtggacgcgccgctggacgacgccaacaccgaacgctacgccaatatggtggcgcgcatgtcggacaagactcaattcgttttcatctcacataacaagattgccatggaaatggctcatcaactcattggcgtgaccatgcaggagcagggcgtttcgcgtatcgtggccgtggatatggacgcggcggtttcgatggcggaggcagcatgaaactgaacatggacctgcagaccgcgctgatcgtcgcgggcctggttttcgtggtactggtgttcggctacaaccagtggcagatccgcaaggcgcgccgcccgcgcgagctcagccccgaagacgacctgccgccgatgcgcgagccggtggtcgggcagggcaccgcgccggaaaccgccgcgcgcctgcacgaagccgctgccgaacaggcaccgcggcgtgagccgacgctatctccggcgcaggccacggccggtgccgcggtggcgacggacagcaaccatgcggctgccgccgctgcggccgccgcaagcaccgcggacgccgacgaagtcgtcgccgaggaagtgtccgtcgcgaccgccgcgacgcatgccgaggccgccgaggacgaggctgaagccaaagccgaggccactccggccccggttcccgcacctgcacccgccccagctccggtggccgccgtgcccgatggccagcccacgcctgccttgatcgatccgctgatcgactgcatcgtgcccctgcacctggagcgcaaggcctccggtgaccgcatcctgccgctgaccggccggctgcgccgcgccggcaccaagcaggtccatatcgagggcctgcgcaccgaagccaatgcatgggagccggtcaccgccggccaccagtacgaagacctgcaggtcggcgtgcagctggccaaccgcggcggcccgctcaacgcgctggaattttcggagttcatcaccgcggtggagtcgctggccgagtcgctcgacgcttcggccgacctgccggacatgagcgagaccgtcgccaatgcgcgcgagctcgacggctttgccgccggctgcgacgtgcagctgggcgtcaacgtgatctcggatggcgcgccgtggtcggcggcgtacgtgcagaacgttgccacgcaggacgggctggtgctgtcgcgcgacggcacgcgttttatccgctaccaggccaatgccgagggcgtgcagcgtccgctgttcacgctgcagttcggcgacaccaacttcctgcgcgacgacctgaccgtcaaggccggccgccagatcacgctgctgctcgacgtgccggtggccgaccaggccgccaggccgttcaagaccgtgtgcgaatacggtcacacgctggcccagcgcatgggcgcgcagctggtcgacgacaattgcggccgctgaccgaggcctcgttcgtcgcgatcttcagccagcttgaaacgctgtacaacaagctggaagcgcgcggcatgccggccggttcgttggtggcgcagcgcctgttcagtatctagccggagcctgccatgaccgcaacacaccgcggcgcgcaggcagatgcctccgcgcccgccggccccttgccgcccgaagccgccgccaagcgcgtggcctggctgcgcgacgagctggatcgccacaactaccagtactacgtgctggacgcgcctaccattcccgacgccgagtacgacgcgctgttcagcgagctgcaggcgctggagctggagcatcccgaactgcagacgccggactcgcccacccagcgcgtgggcggcgagccgctgtcggccttcgattcggtgcgccaccgcgtgccgatgctgtcgctcaacaacggcttcgccgacgacgacgtgctgaacttcgaccgccgctgcgcgcagggcctgggccgcaccgcgcccgcagccggcgagcaggacctgttcagcgcggccgatgcggtcgagtacgcctgcgagctgaagttcgacggcctggccatgtcgctgcgctatgaggacggcaggctggtgcaggccgccacccgcggcgacggcgagaccggcgaagatgtcacggtcaacgtgcgcaccatcaaggcgatcccgctgaagctgcgcggccaggctcccgccgtgcttgaagtgcggggcgaagtcttcatgtaccgcggcgacttcgacaagctcaacgaacgccaggccgaggccggcgagaagaccttcgtcaacccgcgcaacgccgccgcgggcagcctgcgccagctcgatccgcgcatcaccgccaagcggccgctgtcgttcttcgcctacggcctgggcgagctgcagggcgtggaccgtccgcccacccacagcgccatgctcgacggctttgccgcgctgggtctgccagtgtgcaaggaccgggcggtggtgaagggcgcgcagggcctgctggatttctaccgcgatatcggccagcgccgcgacgcgctgccgtatgacatcgacggcgtggtctacaaggtcaacgcactggccgaacaggagcgcctgggctttgtctcgcgcgcgccgcgttttgcgctggcgcacaagttcccggcgcaggaaatgaccaccatcgtcgaggacatcgaagtgcaggtcggccgcaccggcgcgatcacgccggtggcgcggctcaagccggtgtttgtcggcggcgtcacggtgaccaacgccacgctgcacaacgaggacgagatccgccgcaaggacgtgcatatcggcgacaccgtgatcgtgcgccgcgccggcgacgtgatcccggaggtggtcgccgtggtgaccgaacgccgccccgacgatgcgcgcgcgttcgtgatgccgactgcctgcccggtctgcggctcgcatatcgaaaagctggaagacgaagccatcgcccgctgcaccggcggcctgatctgcgccgcgcagcgcaagcaggcgctgctgcacttcgcgcagcggcgcgccatggatatcgaaggcctgggcgacaagctggtcgagcaactggtcgaccagggcatcgtgcgcacgccggcggatctgttcaagctgggcgtggccaagctggccgcgctggagcgcatggccgacaagtcggcggccaacctggtggcggcgatcgacgcgtcgcgcgagaccaccatgaaccgctttatcttcgcgctgggcatccgccatgtgggcgaagccaccgccaaggacctggccaggcatttcggcaagctcgatgcgctgatggcagccgacgaagccgcgctgctggaggtgaacgacgtcggcccggtggtggcgcagtcgatcgcgcacttctttgccgagccgcacaacgtcgaggtcatcgaacaactgcgcgccgcaggcgtacactggacggaaagcgagccggtggccaaggccccggcgccactgtcgggcaagaccttcgtgctgaccggcacgctgcccaccatgtcgcgcgaggacgccaaggaactgctggaagccgccggcgccaaggtggcgggttcggtatcgaagaagaccgactacgtggtcgcgggcgccgaggcaggcagcaagctcgacaaggccgaggcgctgggcgtgccggtgctggacgaggccggcatgctggcgctgctggcagaggccggcgccgcgccggcacaggaataaccggggaaacaaccatgatccgcgagattctcaagatgggcgatccgcgcctgctgcaggtggcgcggccggtggagcgcttcaatacgccggagctgcgcacgctgatcgaagacatgttcgacaccatggaccacgccaacggcgcgggcctggccgcgccgcagatcggcgtggacctgcaggtggtgatcttcggcttcgaccgcaacccgcgctacccggacgcgccgaccgtgcccaagacagtgctgatcaatccggtgctggaaatggagtccgacgagatggaggacggctgggagggctgcctgtccgtccccggcctgcgcggcgtggtgccgcgccacctgcggctgaagtacagcggccatgacctgatgggcaaccgcatcgagcgcgtggccgagggcttccatgcgcgtgtggtgcagcatgagtgcgaccacctgcaggggatcctctatccgatgcggatcaaggacttcaggcagtttgggtttacggaggtgttgtttccggatctgccgccgaataacgacgattgaagagctgtgcggcgcggtatcgaacccgcgcaaggcgcaaaaaaaccggtccccaggaccggtttttttgtgtcggcgaattccggaatcagaacttctcaaactgccccaggaaccgccacttgcccggcggcaggtcccccagcaccacgcgtcccatgcgcacgcgcttgaggccgaccacctgcagcccgacctgctcgcacatccgacggatctggcgcttgcggccttcgcgcagcacgaagcgcagctgctcctcgttctgccagctcaccttggccggcttgaggggaacgccatccagcgacagcccgtggcgcagcagctcgagatcatcggccgggaattccgcgctgatattgcgctcgaccacgccctgcggcgagtgccagatcacgcgcaccaggtattccttctcgacggtcgaatcctcgccgatcagcgcgcgcgcgacgcggccgtcctgcgtcagcactagcaggccggttgagtcgatatcaaggcggccggcgggtgccaggctcttgcgttgccacggggcaaagcgcttgcgcgtgggatcgccttcccactggttctcgggggtgaacagcaccgcggccggctcgtagccgtcttcggcctggccggagacgtagcccaccggcttgttcagcagcaccgtgacacgctcgccttgttcggagcgcgcttcctgcatgatctcgatctcggcgtcggggcggatgcggctgcccagttcggtcacgggcttgccgtcgaccagcacccagccgtgcgggatccattcgtcggcttcgcggcgcgagcacaggcccagttcggacatgcgcttggacaggcgcaccaggccatcgtcgtggctggactcggcgcgggcgggcttttcctggcgcgcggccggtgcctgctggcgtgccgggcctgcggtgcggatgcggtcggcggtgtcgctgaagcggcgtgccggcgcggtgccttcacggcggcgctcgcccgacggcgcggggcgcgggcgctggtcgtcatcgccataacggcgcggacgcgagtcggcgccttcgaagcggcggggacggttctcgtcgtcgccatagcggcgcgggcgcgagtcggcgccttcgaagcggcgagggcggttctcgtcatcgccaacgcggcgcggacgcgattcggcgccttcgaaacggcgggggcggttgttgtcctcgccagcacggcgcggcggacgcgaatcaccgccctcgaagcggcgcggcgggcgcgcttcgccgccttcgaaacggcgcggacgtgcctcgccgcgatcgtcgcccgtgcggcgcgggcggttgtcgtcgtcgccaaaacggcgcggcggacgcgaatcgccgccctcgaaacggcgcggacgtgcctcgccccggtcatcgccagtgcggcgcgggcggttgtcgtcgtcgccgaagcggcgcggcgggcgcgcctcgccgccttcgaagcggcgcggacgtgcctcgccccggtcatcgccataacggcggggacggctttcgtcatcgccgaagcggcgcggacgcgcctcgccgccttccgggcggcgcgggcgtgcctggcgttcgccgtcagcgggacgcggcgcgcgggcctgcgcttcgccctgggccggacggccgccggtcttgccgccggcgcgctcctgggcgcgcttgatgccttcggagacggcttgcacgcgcttgcggttcaggtcggacacgcgcacggggcgggtaccggtcttgcgcgcggccgtgccggtgtcgctggcggccttgatacctagcgtcttgcgcttcggcgaattgctgtcggtcatatgttgatgctgcccgcccgcctcagatggcgagggcggcgagcaagtcctgttcaagctgaatctgcaatcggttgtcggcagccaggcggctgccgtcgaccaggaacacgtcttcgacgcgttcgcccagggtgttgatgcgtgccgtgtggacggatacgcgatgccgtgccagtacgcgggcgatggcgtacagcaggccggtgcggtcgttggcggacagcgacagcaggtaatactggccgcgctcgtcggggcgcaggtccacgcgcggcttgatcgggaagctgcgcgactggcgcgacagccgcccctgcgtgggttcgggcagtgcgccttgcaggcgcagccgctcgcacagttcgtgctcgaccagcgcgatgatgtcgcggtagctgccgccgtcgccggccatgccggggtcggtgacctggaacgtgtccagcgcgtagccgtggcgcgtggtgtggatcttggcgtcctggatcgagaatgccttgcgctcgaagtagccgcagatgcgcgcgaacaggtcgggctggtccttgacgtagaccgccacctgcaggccttcgccggcgggggagacgcgtgccttgaccaccggcgtggggctgtccaccttgttgtacaggtggcgcgtgagccaggcgatatcgtgcgaatcgtggcgcaggaagaaagccacgtcgagctgcgcccacagggacttgcccagcgccgggtcgaaggccttcaggcgcagctcggagatggtgtcttccttgcgctgcgaccacagcgaatgcgaatccacgcgcgcgccgccgagcacgcgcagcgtgatgtggtacaggtcttccagcagcttgcccttccacgcgttccataccttgggactggtgccgcggatgtcggccacggtcagcaggtagagcgcggtcaggtagcgttcgctgccgaccacgcgggcaaaggcgtggatcacatcgggatcggtcaggtcctgcttctgcgccacgtggctcatggtcaggtggtgctcgaccagccagcagaccaggtcggcgtcttcgcgcgcaatgccgtgctgcttgcagaagcggcgcgcatccacggtgccaagcttcgagtggtcgccgccgcggcccttggcgatgtcgtggaacagcgctgccacccacagcacccacggcttgtcgaagctggccatcagctggctgcagaacgggaactcgtgggtgtgctcgacgatggcgaagcggcgcatgttgcgcaccaccatcaggatgtgctggtccacggtgtagacgtggaacaggtcgtgctgcatctggccgacgatgcgccggaagttgatcaggtagcggcccagcacgctggtctggttcatcaggcgcagcgcgtgggtgatgccctgcggctcctgcatgatggccaggaacaggcggcggttttccggatcgttgcgccagcccgcattcatcacggtgcgcgcgttgtacagcccgcgcagcgtgcgcggcgacaggcctttcacgccgggcgtgcgctggtacagcaggaaggtttccaggatcgcgtgcgggtcgcgttcatagatgtcgtcgctggtgatttccagcatgccctggcgctcgacaaagcgctcgttgagcacgcgcgtcacctgagactcgctcgggaacagcatcgcctcgatgttcagcagcagcacgctgttgagctgcgtgactgccttggccgcccagtagtagcggcgcatcagttgttcgctggcgcgcttgctggtggtctggcgatagccgaaggactccgccagcgcggtctgcaggtcgaataccagcacgtcctggcgccggccggccaccaggtgcaggcgcgcgcggatggtcttgagcaggcgctcgttgcgcgcgagctcctgcgcttcgcgctgcgtcagcaggccgcgctcgaaaagttctttccagctgtcgcccaggcccgccgccttggtcatccacaggatcacctgcagatcgcgcaggccgccggggctttccttgcagttgggctcgagcgagtagggcgtgtcctggtacttggcgtggcgctggcgcatttccagcagcttggcctggaagaacgcggccgggtccaggtcggcgaggtagcgcgtacgcatcgactcgaacagcttgcggctgccggtcagcagccgcgcttccagcagcgaggtctggatggtgacgtcctggcgcgactcgcggatgcaatcgtccacggtgcgcaccgaagagccgatctccagcccgaggtcccagcacaggccgataaagcgctccaggcgcccggtggtgtcctggtctggctcggcgggcagcaacagcagcacgtcgacgtcggagtaaggcagcagctcgccgcggccatagccgcccaccgccaccagcgccgcgcccgcgggcatccccaggccgcgccaggcttccaccagcccggcgtcgacggcgcggcgcagccgcgtgatcagcgtgccgacattggcgctgatgttgaagtcggcaaacagtgcctgcttgtcggctttgagctggtcgcgcacgcgcgcggcaagcagcagttccggcgtggtgtccatggtggtggcgggctcggcgagcggattggtgggcacggctggaaaaagaaaggcgcccggtcaggcgcccctggcttcagtgcgacctcaggccgcgacggaatcggtgataaaggccggcggcgccgggctcccggccgataccgtgaggacctcgtagccggtctccgtgaccagcacggtgtgctcccactgcgccgacaggctgcggtcgcgggtcttgaccgtccactggtcgggcatggtgcggatatcgcgcttgccggcgttgatcatcggctcaatggtgaagatcatgccggccttgatctcggcgccggtgcccgggcggccgtagtgcaggatctgcgggtcttcgtggaagttcttgccgatgccgtggccgcagtactcgcgcaccacgctgtagccggcggcttcggcgtgtatctggatggcgtggccgatgtcgcccagacgggcgccgtggcgaacctgcgcgatacccttccacatgcattcataggtcacctgcgacaggcgcttggccaggatcgagccctcgccgacgatgaacatgcggctgttgtcgccgtagtacccttccttggtgatgaccgtgatgtccaggttgatcgcgtcaccgttcttcagcacgcggtcgcccggaatgccatggcagatcacgtcgttgaccgaggtgcagatcgcgccggggaagggcggatagccggggggggcatagttcaggcacgccgacacagtgccttgcacttcacgcatgtaggcgtggcacaggcggtcgatctcgccggtggtgatgcctggctgaacgaagggcgtgatgtagtcgaggacctcggacccaaggcggcaagccacgcgcatctgggcgatgtcttcggcggtgttcaggtgaatgctcatgctgcgtcgccaaaaaagtgatggcgaggccactggccgcgccgaaatcgaaaggtcaatgtaggattatcgcaccatcggggccagatcgcagcctgtgcgcgccggtgctgggcggagtccgcagggcgccaggaagccgggcggcttgagtgggccgcacttttgttgctacaatagcgggctgacttggttgcggcgcagcattgcgtgcgccaggccggtattttgcaggattgttcctgctgtcgtttgaaatcgctggcccgcctatccggggtgttccttttcaggaatgtcggggcgggcttcagacctaaccctctggagttttacatgtccgttaccatgcgcgaaatgctggaagccggttgccacttcggccaccagacccgcttctggaacccgaagatggcccccttcatcttcggtcatcgcaacaagatccacatcatcaacctcgaaaagacgttgccgatgttccaggacgcaatgaagtacgtgcgtcagctggcagccaatcgcggcaccatccttttcgtgggcaccaagcgccagtcgcgcgaaatcctggctgaagaagctggccgtgccggcatgccctacgtcgacgcccgctggctcggcggcatgctgaccaacttcaagacggtcaagacctcgatcaagcgcctgaaggacatggaagccgccaaggaagccggcgcgctggaaaccatgagcaagaaggaagcgctgatgttcgagcgcgagatgctcaagctggaaaagtcgatcggcggcatcaaggacatgggcggcgttccggacgcgatcttcgtggtcgacgtcggctaccacaagattgccgtgaccgaagccaacaagctgggcgtgccggtgatcggcgtggttgataccaaccactcgccggaaggcatcgactacgtgatcccgggcaacgacgactcgagcaaggccgtggccctgtacgtgcgcggcgtggccgacgcgatcctggaaggccgtgccaacgcggtgcaggaagtggttgaagccgctcgcggcggcgacgacgaattcgtcgaagtgcaggaaggctgattgcccgccgcctgattgccggaaaggaacccgctagcgcgcatcgtcaccgcacgacagacaagcaacgcttgccgcccgtcatcacgggctgcgcgcaaggcgaaagccggggtacgccggcagccgggcaagaagggcaattaaaagggggcacatctggcgccccctttttttgaatttgaattgttgtcatccgccgcaggcagtatctgccgcgggtgtgctgtagacccaccgaccgggtgccgcaggcgactgccggcagccggcgtgaaccattcaaggagtgacaaatggcggcaattaccgcaagcatggttgcagaactgcgcgcgaagaccgacgcgccgatgatggagtgcaagaaggccctgaccgaggccgacggcgacctggacaaggccgaagagctgctgcgcgtcaagctgggcaacaaggccagcaaggccgcctcgcgcgtgactgccgaaggcgtggtcgcatcgttcatcgacggcaccaccggcgtgctggtcgaactgaactgcgagaccgatttcgtctccaagaatgacgacttcctcgcgttctcggccaaggtcgccgaactgatcgccaagcagaacccggccgacgtggccgccctgtcggcgctggaaatcgacggcgtgagcgttgaagccacccgcacggccctgatcggcaagatcggcgagaacctgacgatccgccgctttgcccgctacgccaacggcggcaagctggtttcgtacctgcacggcacccgcatcggcgtgatggtcgagttcgatggcgacgaagccgccgccaaggacgtggccatgcacgtggccgccatgaagccggtgtcgctgtcggccgagcaggtccccgccgacctgatcgccaaggagcgcagcattgccgagcagaaggctgccgagtcgggcaagccggccgagatcgtcgccaagatggtcgagggttcggtgcagaagtacctgaaggaagtctcgctgttcaaccagccgttcgtgaagaacgacaagcagacggttgagcagatgctgaaggccgccaacacgaccgtgaagggcttcaccctgttcgtggtgggcgaaggcatcgagaagaagcaggacgactttgccgctgaagtggccgcccaggtggccgctgcccagaagggctgatgtccggggcgccgcggactgcccgttcgggctggtccgggcgcctataatgccgcaggggcgccgtaaggtgcccctctgcataagtagtgcggcgcggcgcaggccgcgttgcaccgcagcagccagtttccgtggtggtccggcagtccggggcaccccgaaaaccggctttcttccgccggcgccacgaggatccgtgccgcctgtgccaaaacatacgtctcaagatcgtctcaaccgagcgatttgctcctgtccgagggtgaacatgccagcctacaagcgcgtccttctgaaactgtccggtgaagccctgatgggcgacgatgccttcggcatcaaccgctccaccatcgaggcgatggtgaacgacattgccgagatcgtgaagctcggtgtgcaggtcgcggtggtcatcggcggcggcaacatcttccgcggcgtcgccggcggcgccgccggcatggaccgcgccaccgcggactacatgggcatgctggccaccatgatgaacgcactggcgctgcaggacgcgatgcgccacgccaatatcgagggccgcgtgcagtccgcgctgcgcatggaccaggtggtcgagccctatatccgcccgcgcgcgatccgccagctggaagagggcaaggtggtgatcttcgccgccggcaccggcaacccgttcttcaccaccgacaccgccgccgcgctgcgcggctcggaaatcggtgccgaggtcgtgctcaaggcgaccaaggtggacggcgtgtacaccgccgatcccaagaaggacccgagcgcgacgcgctacaccaccatcagcttcgacgaggccatctcgcgcaatctgcaagtgatggacgccaccgccttcgccctgtgccgcgaccagaagctgccgatcagggtgttctcgatcgtcaagccgggcgcgctcaagcgcatcatcctgggcgaggacgaaggtacgctggtgcacgtctgaggcagggcgccagacgccgggctgctggcatccggccgggcaaagggtagaatgattcattttcgatccccgccagggggatcatggttggctgatttccggaggtaaaaatgagcgtcgccgacacaaagaagagcgtcgagcagaaaatgcagaagtcgatcgaagccttcaaggccgatctggcgaagatccgcactggccgtgcccacaccggcctgcttgaccacgttcaggtggactactacggctcgatggttcccatcagccaggtcgcggcagtcggcctggccgatgcgcgtaccatcacggtgcagccctgggaaaagaagatggtgggcgcggtcgagaaggccatccgcgactgcgacctgggcctgaacccggccaccatgggtgaagtgatccgcgtgccgatgcccgcactgaccgaagagcgccgcaaggagctgaccaaggtcgtcaagggcgaggccgagggcgccaaggttgccgtgcgcaacctgcgccgcgatgccaacgagcagttcaagaagctggtcaaggacaagaccatctccgaggacgacgagcgccgcggccaggacgaagtgcagaagctgaccgacaagtacgtggccgagatcgacaagatggtcgccgagaaagagaaggagatcatgacggtctgaccccgtcccggcatggccggggcagtcaacgaccgtctgccatcatgcagcacatcagttcaacgctcgacgtacccgatacctcctacgtcccccgtcacgttgccatcatcatggacggcaacggccgctgggcgacccagcggcacctgccgcgcgttgccgggcacacccgggggctggacgcggtgcgcgcggtggtggaagccagcgccgcccgcggcgtgcagttcctgacgctgttcgccttcagttccgagaactggcggcgcccggcggacgaggtctcgttcctgatgcggctgttcatgatggccctgcggcgcgaagtggtgaagatgcacgccaacaacatccggctgcgggtggtgggcgacctggcccgcttcagcccccgcatccagcagctgatccgcgatgccgaggcgcgcacggccggcaacaccggcctgaccgtgaccatcgccgccaactacggcggccgctgggacctgctgcaggccatgcgcaagatgctggcgcgctcgcccatgctcgacccggcctcgatcgacgaatcggtgctggcgccgcacctggcgatggcctatgcgccggagccggatctgttcatccgcaccggcggcgaacagcgcatcagcaacttcctgctgtggcagctggcgtattccgagttgtatttcacggacgttttctggccggatttcgacgcagcggaactggacaaggccttcgcctcgtaccgccagcgcgaacgccgtttcggccgcaccagcgcacagctggttgccccgggactatcgggtacggcctgagcctggctactccaacctctcacgggactgcagcgcatgctcctcacccgcgtcatcaccgccctgtgcctgttgctgctgatcctgccaatcctgttcctggcaccgcccgcggctctggccgggctggtggccgtgatcgtgctgctggccggctgggaattcggccgcctgatcgggctgcgcgggccgtggccctatgtctatgcgctggcatgcctgatcgcggccattgcctggcatgacctgccgctgcgccacgccaccacctggctgctcgaagccgcggtagtgtgctggggcatcgcagtggtgctgctggcgcgcggcgtgcggtccgcgacgccgtcgttcaccgccctgggcgcggtgctggggctggtgatgctgcccgccttcgcccatgccaccatgatcctgcgcggcgccggcatcggcgtgctgctgaccgcggccgtgctggtgtgggcggccgatatcggcgcgtatttcaccggcaaggccatcggccggcgcaagcttgcgcctggcatcagcccgggcaagtcctgggaaggcgccatcggcggctggctgctggcgctggtgatcggcctggcgctcgccgccagccatgcctttgcaccgacctggttctccgcgatgggcgaccgcggcgggctggcctacgtggcggtgctgaccacgctgctggtcgccgcgagcgtggtcggcgacctgttcgaatcgctgctcaagcgccaggtcggcaagaaggacagcagccggctgctgcccggccatggcggcgtgctggaccgcatcgacgccttgctgccagtgttcccgctggcggccctgatgctgatttttctctgaagccgtctgctatgcatcgcattaccatcctgggcgccaccggctccattggcgaaagcacgctcgacgtcgtcaggcgccatgccgaccgctatgtggtgcatgcgctgaccgcccaccggcaggtgcgcaagctggctgaccagtgcgttgaattccgcccggcccgcgccgtggtggggaccgccgaggcagcgctcgaactggaaaccctgctgcgcgatgccggcgtgaagaccgaggtcagccacggcgaagccgcgctggaatccgtggccgccgatgcgcagaccgattcggtgatggccgccatcgtcggcgccgccggcctgcgcccgacgctggcggcagcacgtgccggcaagcgcgtgctgctggccaacaaggaagcgctggtgatgtccgggcgcatcttcatggatgcggtgcgcgagcacggcgccaccttgctgccgatcgacagcgagcacaacgccatcttccagtgcctgccggccgacgatccgcgctacggccggggcgttgccagggtgctgctgaccgcgtcgggcgggccgttccgcacgcgcgacccggccacgctgcacgatatctcccccgaccaggcctgcgcccatcccaactgggtcatgggccgcaagatctcggtcgattccgccaccatgatgaacaagggcctcgaagtcatcgaggcgcactggctgttcggcgcccccgccgagcgcatcgaggtactgatccatccgcagagcatcgtgcattcgatggtggcctacaccgacggctcggtgctggcgcaactgggcaacccggacatgcgcacgccgatcgcctatggcctggcgtatccggagcggatcgatgcgggggtcacgccgctggacctgaccgtggctgggggcttgcatttcgagaagccggacctggtgcgcttcccgtgcctgggcctggccttcgatgcactgcgcgccggcggtgtggcgccggcggccctcaatgcagccaacgaggtggcggtcgaggcattcctgggcggtacagtgcgcttcacggacattgccggtatcgtccggcaggtgcttgaggcgacaccccaggggcctgccgatacgctcgaagcggtgctgtcagccgacgcgctggcgcgcgaggcggcacgcgagggcgtggccgccctggctgcaaagcgctgatccggtggggcggcttgccgcatctgcgacaatagcggctgcggcggccccggatccccggggcccggcgcgccagtcctgccatcgttaccgacgtcccgactccatgcaaaccgtactcgctttcatcgttgccctgtgcgtgctgatctatgtgcacgaaatggggcactacctcgccgcgcgcgcctgcggcgtgaaggtgctgcgtttctcgatcggcttcgggcggcccttgctgcgctggatctcgaaaagccgcgaccggaccgaatggacggtggcggcgatcccgctgggcggttatgtcaagatgctggacgagcgcgaggtcgaccccgagcgcgacacgccgatcgacccggccgacctgccgcgggctttcaaccgccagccggtcggcaagcgcttcgtgatcgtggcggccggcccgctggccaattttgcactggcaatcgtgctgtatttcgcgctctttgccggcggcatgcgcgagcccgtgccggtggtggcggcgcccgcggccggcaccatggcggcgcaggccggcgtgcgcgaaggcgaccgggtgctgtcgctgaccgccaatgaccataccgaagcagtgcgatcctggaatgacctgcgcatggccgtattcgccgagggctttggcgatgcgcgcgccgtgctgcgcgtgcgcggcgccgacggggccgagcgcgacgtaacgctgccgcgcctgcccaataccggcggcaatcccgagcaggatccgctggccacgctgggcctgaacctgaagggcgggccggtgacgattaccgaggtgctgccggactcggccgccgagcgcgccggactgaaaaaggacgaccgcatcgttgcctggcagggcagcccgctcacgcaggccagcgcgctgatcaaggcggtgcgcagccagcccggccagaccgtgacactgggcatcgagcgcgacggcaagcgcctggacgtgccggtgacgctagacaccgccgtggcgcgcgatggcgccaaggacgcgagtggcgccaccgcggcgccggcgggcaagctcggcgcggcgctcagccaggcggtgcagatggaaaccgtgcgctaccggccggaccaggcgctggcgcgcgcggccggccaggtctgggacaccagcgcgctctcgctcaagctgctgggcaagatgctggtggggcaggcttcgctgcagaacctgagcggtccgctgaccgtggcggactacgcggggcgtgccgcaaaccttggcctgcaggcctttgtcagcttcctggcactggtcagcgtaagccttggcgtactcaatttgttacccattccggttctggatggggggcatttgctgtattattgcgtggaatttttgactggccggcccgtcccagaccactggcaggcaatgctgcagaaggttggcatcgcctgcatcttgctcctgacttcgctcgctttgttcaatgacgtcagccgaatgtttctggcgaacggctagaaacgtgtgtcggcaagggggcggtggtgtcgtcgggcaccgtcgccagggacgccatttgccaggcgcagtccgaaggcatcggagcgcaatcctggatggaatcaaagaggggatcaacattgatcagacataagcgcatttcgctgggcttgctggcgagtgccgttattgcagcctggagcccggcgggctgggctgccgatccgttcgtcgtcagggacatccgcgttgagggcctgcaacgcgtcgagccgggtaccgtgtttggctacctgccagtgcgcgtcggtgagaccttcaccgatgacaagggcgccgacgccatccgtgccctctacaataccggcttcttcaaggacgtgcagatccgcgccgaggaaggcgtgctggtggtccaggtcgaagagcggccggcgatctcgcagctcgaattcgtcggcatcaaggaattcgacaaggacacgctgcgccgttcgctgcgtgccgttggcgtggccgaagcccgttactacgacaaggcactgatcgacaaggccgagcaggagctcaagcgccagtacgtcgcgcgcggctactatgccgccgacgtgcagaccacgatcacgccggtggaccgcaaccgcgtctcggtcgtgttcaacgtggatgaaggcccggtcgccaagatccgccagatcaatatcgtcggcaacaaggctttcaaggaaggcacgctgcgcgacgagatgcagctgtccacgccgaactggctgtcctggtacaccaagaacgacctgtattccaagcagaagctgaccgccgacctggaagcgctgcgctcgttctacctgaaccgcggctacctggagttcgcgatcgagtcgacccaggtgtcgatcacgccggacaagaaggacatcttcctgacgctgaacatcaaggaaggcgaccagtacaaggtgtccgacgtgcgcctggcgggcgagctgctcggcaagcaggaggaaatggaaaaactgctgcagctgaagaagggcgatattttctcgtccgagaagctgacgcagagcaccaaggccatcaccgacctgctgggcacctacggctacgcgttcaccaccatcaacccgcagccgcagatcgacaaggaaaagcgtgaagtcgcgctgaccctgatggtcgacccgggccgccgcgtctacgtgcgccgcgtcaacgtggtgggcaacagcaagacccgcgacgaagtggtgcgccgcgagatgcgccagatggaaagctcgtggttcgacagcgagaagctcacgcagtcgcaagcccgtatcaaccgtaccggctacttcaccgacaccaacatcaccaccgaggacgtgccgggcgcgcccgaccaggtcgatgtgaacgtcaacgtgactgaaaagccgaccggccagatcagcctgggcgtgggcttctcgtccaccgacaagctggtgctgcaggccggcctgcgccaggacaacgtgtttggctccggcaccagcctgggcctggacgtgaacacggccaagtcgttccgtaccatcgcgctgacgcagtacgacccgtatttcacggtggacggcatcagccgctcgaccgacatttactaccgtacttcgcgcccgctgtactacaccggcgaccaggactacaagatcgtgtccgccggtggtggcttcaagttcggcgtgccgttctcggaagtcgatacggtgttcttcggcatcggctatgaacggacccaggtgtatacctcggtcaacacgccgagccagtacaccgactggctgaacaagatcggcaagagttccggcgacggcatcaacaacttcccgttcaccatcggctgggcacgtgaccgccgcgacagcgcgctggtgccgaccaagggcccgtacacccaggccaacctggaagttgggctgccgggcggcgatacgcagtactaccgcgccagcgtgcagcagcagtacttctatccgatctcgaagtccttcacgctggcactgaacggcgaagtcgcgtacggccacggctatggcaacacgccgttcccggtgttcaagtacttctacgccggtggtatcggctcggtgcgtggctaccagaccagcacgctgggcccgaaggaccagaatggcaacccggtgggcggtgcctcgaagatgatcggcaacgtcgagttcatcttcccgctgccgggctcgggcgtggaccgcacgctgcgcctgttcacgttctttgacttcggtaatgtctaccaggaaggtcagccgctgagcttcagcgagctgaagtactcgactggctttggcatgtcgtggttgtcgccgattggcccgctgaagatcagcatgggcttcccgctcaatcgcgacaccaatgacaaggtccagcgcttccagttccagatcggcacggcattctgattctgataaaggatctgtttcaaatgattacaacatccaaactggtcaaatccctgggcgccgccgcgctcgccaccgctgccatctgcgccgcggtgccggccacggcccaggaggcgcgcattgccgccgtgaactccgaacgcatcctgcgcgactcgcagccggccaaggctgcccaggtcaagctggagcaggagttctccaagcgcgaccgcgagctgcaggacatggcccagaagatcaagggcatggccgacaagctcgacaaggacacggccgtgctggccgactccgaccgccagcgccgccagcgcgaagtggccgaccttgaccgcgagttccagcgcaagcagcgcgagttccgcgaggacctgaaccagcgccgcaatgaagaactggcacaggtgctggagcgcgccaaccgcgtgatccgccagctggccgagcagcgcaagtacgacctgatcgtgcaggaagcggtatacgtgaacccgcgcatcgacatcaccgacgacgtgatgaaggcgctgaacgccggcgcccgctaagccgcaccggtcctcacgttccttcgtctttcgtttttttaggaagtaccgccatgcagacacccacactgggtcagctcgccaccgagaacggcgcgcaggttgtgggtgaccccgacctggcgatcgtcggcctggctcccctggaccaggccggaccgggcgagctctcgttcctgtccaatccgctctacctgcagcaggcgctggattcgcaggccggcgccgtgattgtctcggcagccgacctcgagcgcgttcgcgccgagggcagggccgacggccgcaactggctggtggcgcgcaatccctacgtatgctttgcgcgcgtggcgcagcgttttgaccgcgccgccaacaccgatacccgcaccggcatcgatccgcgcgcgaccgtggcgcctgacgcggtggtgccggcttcgtgctacatcggccccaacgtggtcatcgagcgcggtgcgcgcctgggcgagcgggtgcgcatcctggccaacggctatgtcggcgcgcaggcagagatcggcgacgattcgctgctctatgccaacgtttcggtctaccacgattgcgtggtcggcgcccgcgccatcctgcacagcggcgtggtgatcggcgcggacggctttggctttgcgccggacatcggcgcaaccggcgtggaatacgtaaagatcccgcaaacgggacgcgcggtgctgggcaatgacgtggaggtcggcgccaatacggcaatcgaccgcggcgccatggccgacaccgtgatcgaggacggctgcaagatcgacaaccaggtccagatcgcgcataacgtgcgtgtcggcgcccatacggtgatcgcaggctgcgccgcggtatcaggcagcacgcgcatcgggcgcttctgcgtgatcggcggagcggccaatttttccggccacctgaatattgccgaccgcaccacggtgtcgggcggcacctcaattaccaaatccattaccaagcccggggggcatttcaccagcgtcttcccgttcctgccgcacggcgagtgggagcgcaatgcagccatcgtgcgcggcctgaccaggctgcgcgaacgggtggtggcgctggaacgccgcctgcgcggccaggccgccgggtcccaaccctcacaagactaaagagaaatcatcatgagcgcggccgaaatcgatatccgcaagatcctcaaactgctgccgcaccggtacccgttcctgctggtggaccgtgtgctggagttcgaggcgcagaagcggatcaagacgctgaagaatgtcaccatcaacgaaccgtacttccagggccatttcccggaacagccggtgatgccgggcgtgatgatcctggaagcgctggcgcagtcggccggcctgctgaccttcggcgccgacatggagcgcaaggaaggcgcgctgtactactttgtcggcatcgacggggcccgcttcaagcaggtggtgtacccgggcgaccagctgcacatgaacgtgacagtcgaacgctatatccgcggcatctggaagttcaaggcgttcgccacggtggacgacaaggtggcctgcgaggcggagctgatgtgcaccgtgaagcaggccgagtgaggccgcgcgcggccggcggcagcgccgccggctgactgccgtgcccccgtgcagcgggggcaagcggcccggacgggaacctttgccgcgcgcattggcccatccttcaccagacacaccacaggacaggacgtatgacgcaaatccaccccaccgcgctggtcgacccgaaagcagagctggcatccgacgtgaccgtcggcccgttctctatcgtcggccccaacgtgcggatcggtagcggcacccgggtcggctcgcatacgacggtcgagggttacaccacgatcggcgagggcaacacgatcggtccttatgcatcggtcggcggcgtgccgcaggacatgaagtaccgcaacgagccgacccggctcgagatcggcgaccgcaacaccatccgcgaattcaccacgatccacaccggcacggtgcaggaccgcggcctgaccagcctcggcaacgacaactggatcatggcctacgtgcatatcgcgcatgactgcacggtcggcaaccacaccgtgttttccagcaacgcgcagatcgccggccacgttgaagtgggcgactgggcgatcctgggcggcatgagcggcgtgcaccagttcgtgcgcatcggcgcccatgcgatgctgggcggcgcctcggcgctggtgcaggacgtgccgccgttcgtgatcgccgcgagcgacaagagcggcaacaaggctacgccgcacggcgtcaacgtcgaggggctgcgccgccgcggcttcgacgcgggccagatcgccgcgctgcgccaggcctacaagctgctttacaagtccgacctcagcttcgatgaggcgcgcaatgagatcaccgccttgctgggccaatccgatgccggcactgcggcgccgctgcgcgcgttcgtcgacttccttgccgccacccagcgcggcatcgtacgctgagaccggaccgcaatggtcgacgccgcaattcggggtggcttgtccacaggcaacggtagcgccgcgggcaagcgcggcaccatcgccatggtggccggcgaggcctcgggcgacctgctggcatcgttgatgatgggcgggctgcagtcccgcctgggcgatacggtcgagtacgccggcatcggcggcaagcgcatgatggcgcagggcttcacctcgcgctggccgatggaaacactgtcggtcaacggctatgtcgaggtcctgggctcgctgcgcgagatcctggccacgcggcgcgcggtgcgcgactggctgctggccaatccgccgcaatgctttatcggggttgacgccccggacttcaatttcggcctggaagtgccgctgcgccgtgccggcatcccggtggtgcattttgtcagcccgtcgatctgggcctggcgcggcgggcgcatccgcaccatcgcgcgcgcggtggaccacatcctgtgcctgttcccgttcgagccggagatctacgccaaggccggaatcccggccacctacgtgggccatccgctggctgacgtgatcccgatggtgcccgacgtcgccggcgcgcgcgccgaactcggcctgccggccgggcaccgcatcgtcgccgtgctgccgggcagccgccagtccgaagtgcgcaacctcggcgccaccttctttgccgccatggctcgcatgcagcgcatggacccgaacctggcgttcgtgctgccggtggcgagcgcgcagctgcgcggcatcgtcgaggaactgcacgcgcagtatccagaactgcgcctgaccatcgtcgacggcaagtcgcaccaggcgatggaggcggccgacgtggtgctgctggccagcggcaccgccacgctggaagcggcgctgtacaagaagcccatggtgatctcgtacaaggtgccctggctgaccgcgcagatcatgaagcggcagggttacctcccgtacgtgggattgcctaatatcctttcagggcgcttcgtcgtgccggaactgctgcaggacgatgccacgcccgaggcgctggcccgcgaaacgctgctgcagctcaacgacgagggcaacaccgccttcctctacgagcatttcacccgcatgcacgagacgctgaagtgcaataccgcgcaactggccgccgatgtagtggtggatctgatgcacagccgggggaccgtctgatggcgcgccgcaatgccgcttctccccagatgggcctcgatctcgccccggccgccgccgccgtgcagcgcctgtgcggcgttgacgaagcgggccgcggcccgctggccgggccggtctatgccgccgcggtgatactggacccgaagcgtccgattcgcgggttggccgactccaagatcctgactgccgccaagcgcgagcagctctacgaaaagatctgcgaacgcgcgctgggctggcatatcgcctttgccacggtcgaggagatcgatacgctcaacatcctgcacgcgagcatgctggcaatgcagcgtgccgtgcaggggctggccgccagcggcatcgtgccggatctggtgcaggtcgatggcaatcgttgcccgcgggtgccgttcccggtggaagccattgtccagggcgatgcgctggtcaaggcgatctcggccgcgtcgatcctggccaaggtggcgcgcgaccgcgagctgagagtgctgcacgagcgctatccgcagtacggcttcgattcgcacgtcggctatggcacgccgcagcatctggctgcgctggctgagttcggcgccacgccgcaccaccgccgttcgtttgcgccggtgcgcgaggcgctggcccggctgcccatgttcaccgccatgcccgccaccgcggaagtcatcgagcctgtcgcgacggtatccgtcacggccgcgcagtgaagggcacccagaccatctccgcatcgtgaagcacgtcacctcgcgcgacaacgcgctgttcaagcatctgaagaccctggccacttccacgcaccagcgccgcaaggcagggcagtcgctgctcgacggcgtccacctggcgcaggcctatgtggccgcgcgcggccagcccgtcacctgcgtggtgtcggaacggcactacgaccatgccgaggtggcgccggtgctggcgctgatcgaggccgagcgcgtggtggtgctggccgatgcactgttcacgcagatcagtggcgtggtcaatggcatcgacctgatgctggtgatcgagacgccggtcggccacctgccggcgcgaatcgaacaagactgcatcatcctggacggggtgcaggatgccggcaatgtcggctcaatcctgcgcagcgccgccgccgccggcatccagcatgccttccttgccaccggctgtgcctttgcctggtcggtcaagacgctgcgtgccggcatgggcgccaactttcacctgaatatcgtcgagcactgcacgcttgagtcgctggcgccgcgcctcgcggtgccgctgctggcgacttcgtcgcacgccgatgccgcggtattcgataccgatctgcgcgggccggtggcctgggtggttggcaacgagggggcaggggtcagcgacggctggatggcgcatgtcacgcgcaaggtgggcatcccgcaaccgggcgggctggaatcactgaatgtggcggcggcgaccgccatctgcctgttcgaggcagtgcgccagcggcgcgccgcctgaggctgcgccggcagcgcaagaaaaaaagcggcctgaacggccgcttttttcttagtagttgtcgcgatcgaccttgatctcctgcaggatcgtggtcgcgatctcttcaatcgatttgtgcgtggaagagagccatttgatcccttcgcgccgcatcatcgcctcggcctcgttgacctcgtagcggcagttttccagcgccgcatacttgctgccggggcggcgctcgttgcggatctcggtcaggcgctgcggatcgatcgacaggccgaagatcttcggcttgaacgcatacaacgccgacggcagccggccgcgctcgaaatcgtcggggatcagcgggtaattggccgccttcagcccgtattgcatggccaggtagaggctggtcggggtcttgccgctgcgcgatacgcccaccaggatcacatcggcttcttccaggttcttgtgtgactggccgtcatcatgcgccagcgagaagttgatcgcctcgatccggtttttgtaagcctctgtgtcagcgttctggtggaagcggccgatggcgtgagtcgacttcagccccagttctttctcaagcggctcgatgaaggtctggaacatgtccaggatcatcgccttggcgcggcgcagtgccttgttcgcttcctggttgaccagggtggtgaagacgatgggcggcacgccttcgttgtggaatgcctcattgatcttgccgacggcgatatgtgccttttccggggtatcgacgaagggcatgcgcaccttgcggaagcgcatctcgaactgggccaggatggagtggctgaacgtctccgccgtgatgccggtgccatccgagacgatgaacacggtgcggaccgcagggcgctcgctggcctggggcgcgggagcggagggggattcaggctgcgttccaggctgggacccgggcgtcgccgttccgggcgcttctggcagggacatggggatggcgcaataaataaatagattcaatcttccgcagaaaagtgcggcgcagcacggtagaatagcggcgatcttttcgctaagcaattccgcagggtgcctgtccatggaacaatccgggcccggaattgtcgacaatctgcgctacgcgatgagagccgtagcgccaggtccgcagcgccagttcggggttgcttagccaagcgatcagtccgggaacagaactccaagaacataccggacatgcgcgacaagttttctactttgttttgaggctctcatgactaaccaggcagataacggcgcctacgtgttgccgttcgagcagttgcgcatggctgacgtggaaatcgtcggcggtaagaattcgtcgctgggcgagatgatctcccagctggcggaggccggcgtccgggttcccggcggctttgccaccaccgcgctcgccttccgcgacttccttgcccacaacaacctgaccgagcgcatttcccagcgcctgaagaccctgaacgtcgacgacgtcaaggcgctggccgaggccggtgccgagatccgcgagtgggtcgcctccgcgccgttccagccgcgcctggaacaggaaatccgtgaatcctacgcccgcgtggccgagcgcgaaggcgccgaggcctcgttcgccgtgcgttcgtcggccaccgccgaagacctgcccgacgcctcgttcgccggccagcaggagtcctacctgaacgtcagcggcatcgacgacgtgctcgacaagatcaagcacgtgtttgcgtcgctgtacaacgaccgcgccatttcctaccgcgtgcacaagggctttgcccatgacgtggtggcactgtccgccggtatccagcgcatggtccgttcggacctggccgcttcgggcgtgatgttcaccatcgacaccgaatccggcttccccgacgtggtcttcatcacctccagctacggcctgggcgaaacggtggtgcagggcgcggtcaacccggacgagttctacgtcttcaagccgacgctgcaggccggcaagtacccgatcatccgccgctcgatcggctccaagctgatcaagatggaattcaccaagccgggcgaagccggccgcgtgaagaccgtcgacgtgccgggcgaactgcgcaaccgctactcgatcagcgacgaggacgtgaccgagctgtcccgctacgcgatgatcatcgagaagcactatggccgcccgatggacatcgagtggggcaaggacggcaaggatggcaagatctacatcctgcaggcccgcccggaaacggtgaagagccagtccgccggcaaggccgagctgcgcttcaagctcaagggcaccgctcccgtgctgaccagcggccgcgccatcggccagaagatcggcaccggcccggtgcgcgtgatcaacgacccgtccgagatggaacgcgtgcagcccggcgacgtgctggtggctgacatgaccgacccgaactgggagccggtgatgaagcgcgcctcggccatcgtcaccaaccgtggcggccgtacctgccacgcggccatcatcgcgcgtgaactgggcgtgccggccgtggtcggctgcggcgatgccaccgacatcctcaaggacggcacgctggtgacggtatcgtgcgccgaaggcgacgaaggccgcatctacgacggcctgctggaaaccgaagtgaccgaagtccagcgtggcgacatgccggaaatcgatgtcaagctgatgatgaacgtgggcaacccgcagctggcgttcgacttcgcgcagatcccgaactgcggcgtcggcctggcccgcctggaattcatcatcaacaacaacatcggcgtccacccgaaggccatcctcgactacccgcaagtcgatgccgacctgaagaaggccgtggaaagcgtggcccgcggccatgccagcccgcgcgcgttctatgtcgacaagctggccgagggcatcgccaccatcggcgcggccttctacccgaagcccgtgatcgtgcgcctgtcggacttcaagtccaacgagtacaagaagctgatcggcggttcgcgctacgagccggacgaggaaaacccgatgctgggcttccgcggcgcctcgcgttacatcgccgacgacttcgccgaagcgttcgagatggaatgcaaggccatgaagcgcgtgcgcgacgaaatgggcctgaccaacgtcgagatcatggtgccgttcgtgcgtacgctgggccaggccgagaaggtcatcgagctgctggccaagcacggcctgaagcggggtgagaacggcctgcgcgtcatcatgatgtgcgaagtgccgtcgaatgcgatcctggccgaagagttcctgcagtacttcgacggcttctcgatcggctcgaacgacctgacccagctcacgctgggcctggaccgcgactccggcatggagctgctggccaaggacttcgacgaacgcgatccggcagtgcggttcatgctgtcgcgcgccatcgaggcctgcctccgcctggacaagtacgtcggcatctgcggccagggcccttcggaccatccggactttgccgaatggctggccaaggaaggcatcaagtcgatctcgctgaacccggactcggtggtcgagacctggcaaaagctggcttcctgaagcatttgacgtcacaataacgacattgccggcgccttctggcagccggcaggcaccggccctgcgtcaggtgttgctactgccccgcagacgctgaaaggcgctgcggggtttttacttttcgggatgtatctggacgaacgggagcttggatggcgtactacatctggttcgtggcagcggtcgcgctggtgatcatcgagatgaacaccggcaccttctacctgctgatggtggcggtggggctggccgccggcggcgtgggggccttgctgggattgtcgccggccgcgcagacgctggtggcggcgctggtcgctgcggtgctgatcgccggcctgcgccgcacccgctttggcaagctgcggcgcggcaacgccgccgccgatcccaacgtcaatatcgatatcggccaggagctggacgtgcccggctgggacgccaacgggcgcgcccgcgtgccgtaccgcggcgccgactggaccgtggagctggcgcccaactgtgccgccgcaccaggacgccaccgcatcgtcgcggtgcgcggcagcaccctggtcgtgtctccccgctgaaaccctgtcttattgcgcagcgcggcaattgtcgcgctgcgatccgtctgccgccgcctggcggctccgtactgctgtcttctgtctggagggtcgttacatgctcgcatttcagcttggtttgttgccgctgatcatcctcattgccgttatcgtgctgattgccaagggcatcaagatcgtgccgcagcagcatgcctgggtgctcgagcgcctgggccgctatcacgcgacgctgacgccggggctgtcgatcgtggtgccgttcgtcgaccgcgtcgcctacaagcacgtgctcaaggaaatcccgctggacgtgcccagccaggtctgcatcaccaaggacaacacccagctgcaggtcgatggcgtgctgtacttccaggtcacggacccgatgaaggcatcgtatggatcgagcaatttcgtggtggcgatcacgcagctgtcgcagaccacgctgcgctcggtgatcggcaagctggagctcgacaagaccttcgaggagcgcgagttcatcaaccacagcgtggtcaacgcgctggacgaggccgcatccaactggggcgtcaaggtgctgcgctacgagatcaaggacctgaccccgcccaaggagatcctgcacgcgatgcaggcgcagattaccgccgaacgtgaaaagcgcgcgctgatcgcggcgtcggagggcaagcgccaggagcagatcaacctggccacgggcgcgcgcgaggcggcgatccagaagtcagagggcgagcggcaggccgccatcaacacggcccagggcgaggcgagcgcgatcctggcggtggccgaggccaacgcgcaggcgatccagaagatcggcaatgcgatccgcaccgaaggtggcatggatgcggtcaacctgaaggtggccgaggaatacgtggccgcgttcggcaacctggccaagcagggcaatacgctgatcgtgccgggcaatatgggcgacatgagcagcatgatcgcggccgccctgcagatcgtgaaggggcagcagaaggctgcctgaaggggctgacggacacgccgcggcagcgcggcgccggggctcagtccttggcgtcgcccttcatgatgcgggccttctcgcgctgccagtcgcgctgtttctcggtctcgcgcttgtcgaactgcttcttgcccttggccaggccgatctcgcatttgacgcggccgcgcgtgtagtgcaggttcagcgggaccagcgtgtagccgcgctgctcgaccttgccgatcagcttcttgatctcgtcggccttgagcagcagcttgcgggtgcgcaccgggtcgggattgacgtgggtggaggcgctttgcagcggactgatatgggcgccgatcaggaacatctcggcgtcgcgcaccaccacgtagccctccttgatctgcacccgcccggcgcggattgccttgacctcccagccttccagcacgatcccggcctcatagcgctcctcgatgaagtaatcgaagaaggcctttttgttatctgcaatggtcatgcgtgcgggtggggtgcggtagggtggaattcagccgtttcgctgcggcgccacatggcaggatgccgcggggcgcgcgtgtcggctaaaatccgaattctagcaaaccagccccggcacaggcgcatgcctgccgcgcacagcgtgcggcatggccgcaagccagattttcccatacatggcagacgtccataaatccgtactgctcggctactcggccgcgcagatgtacgacctggtcacgcgcgtggaggactatcccaagttccttccatggtgcggtggcgtggaggtgttcgagcagaccgataccatgctcgacgccaagatccatatccacttcaaggggatccagcagttcttccacacccgcaatacgcaggaacgccccacccgtatcgacatgacctttgccgacgggccgttcaagaccttcaacggcgcatggcgctttacgcccctgcgcgaagacgcctgcaagatcgaattccacctgcactatgagttttccagcctgctgctggaaaaaatcatcggcccggtcttcagcatgattgccaatacctttgtcgacgccttcgtcaagcgggccgaggtggtctatgtcgccaactgacgccggcgcggggacggtgcatatcgcggtctgctatgcgcggcccgatagtgtcttcctgaaggagatcgacgtgccagccggcaccacgattgccgcggccatagtcggctccgggctgcagcaggcctgtccggaggtggacccgtcgaccatgcgggtgggcatcttcggcaagctcaagacgccggagacggtggtgcgcgaaggcgaccgcgtggaggtttaccggcccttgaccgccgatcccaagcaggcgcgccgcaagcgggtgcagaagcagcgcgcgggcggcacgcgcgaaggccagaagtggttgcgcggcagcggttgagccgagcctgccaggcatgcaaacggggccgatgcgccccgtttttctttggtttcagctgcagttcttctcgaggctggcgttggtcttgagcacctcggcctggcgttggtcgctgttcaggtgttgcagcgaaccgtccggacccgccaccgcggcgcgcatgccttgctgcaggccgttggcgtagttgcgcagctgcgcgcagcgggcctcgcgctcggccgcctcgctttccttgcgggcctcttcggtggcggctttcaggctggcctcgcggcgcttctggaaggcttcttcgggggtcggcgccggggccgcggcgggcttggccgaggccttggccggagccggggcaggggcaggggcgggcgccccggcattggcggcctccaccggctggagctcgccggcaaagcggcccggggcacgcagcaccctggctgccgccgctgacggcggcacgtcgctgtagaccatgcggccgttggcgtcgcgccattgccagtaggcaagggcctggacgggaacggcgagagtggcggcggcaagcaggcacagcgcggacgatcgtttcatggcgaggcgtcttaaagtgactcggaagtaactggtgcggctggaatcgtgctgggccgccggctgcgcgcatggcgatgccgcggcaggacagccgcggcgatggcttggcgcccgcccggtatcaggtgcgtagcgccggtttgaccctggtaaagctgttgttcgtggcgcgtgtgacccccgcgccatcgttcgctagtctacgcagacttgtcggtggcgtgcaagcgcaccgaccaggccacgccgaccatcagcaacacaatggcggcgatttccagcggccgcggccagcggtggtcgaagacaaagccgtaggccagcgcgaacagcgtctcgaacacgatcatctggcccgacagcgtcagcggcaggcgccggctggcgatgttccacaggttgttgccaatcagcgacgcacccagcgccactgcggcattgaccatccagaaccactgccagtcacggccgctgtcgcccgcggtcagcgtgtcgccagccagcacccagccgatcacggccagcaccgccgacaccgcgccggtcgacaacccgtacagcgccgaccattcattgccgctgtagtgcgggttgcgctgcaggtagcgtgcgttatcgaccgcgtagagcgtccagcagaccagcgcgccggccgcgcagcagaccccggccagtttctgccagaccggccggattgccgcgccggctgccgccgcgtgggcgctctggccgccgccgaacaggtcgatattgatgcaggcgatgccggcggccaccaccagcagcggccacatcagccgcgacagcggcacggcgccgtggtcgcgccggcccatgatggtgaccgagatcggcaggatgccgatgatcagggaggtggggcccaccccggcgagctgcacgccgaaggccagcagcacgtagtagagcaggttgccggtgaaggcctggcgcagcagcgccacgcagtccgcccgggtcagcttgcgcgcgatgcgcttcatcagcggcagcgcggccacgaaggcgaccaggccgtaggccaggtagcggccgatggccagctcccacggcgagaacacgggcagcagcttgggggcgataaagaccatgccccagaaggcgcctgccagcagcccgcacaatacgccgattcccatgcttcgcgttcgcccgaataaaaggacgacgagcatagcagaccgcttccaggaaagcccattgcagtgcatcagcaaagcgcgcattcctgtataattcggttttgcgcctagaggatttgctatgcgtcttgtccagaaagcactcacattcgatgacgtgctgctcgtcccggcctattcggccgtccttccccgggatgtctccctccgcaccagcctgacccgctccattgaactgaacatcccgctggtatccgcggcgatggacacagtgacggaagcccgcctggcgatttccatggcgcaggccggcggtatcggcatcgtccacaagaacctgaagcccgccgaccaggcccgcgaagtcgcgcgcgtgaagcgctatgagtcgggcgtgctgcgtgatccgatcaccatttcgccggacatgaaggtccgcgatgtgatcgcgctgtcgcagcaacatggcatttccggcttcccggtgctggaaggcaaggccgtggtcggcatcatcaccaaccgcgacctgcgcttcgaggaagagctcgacgccccggtgcgcgccaagatgacgccccgcgaaaagctggtgaccgtggccgaaggcgcgacactggaagaagccaagcgcctgatgaaccgccaccgccttgagcgcgtgctggtggtcaaccaggctttcgagctgcgcggcctgatcacggtgaaggatatccagaaggcagtggacaatccgctcgccagcaaggacgagcgcggccagctgcgcgtaggcgccgcggtcggcgtgggtccggacaacgacgagcgcgtcgaactgctggtcaaggccggcgtcgatgtgattgtggtggatacggcgcacggccatagccagggcgtgctggaccgcgtgcgctgggtcaagcagaacttcccgcaggtgcaggtggttggcggcaatatcgccaccggcgatgccgcgcgtgcgctggtcgagcatggcgccgacggcgtcaaggtcggcatcggcccgggctcgatctgcaccacgcgtatcgttgccggcgtgggcgtgccccagatcacggcggtttccaacgtggccgaggccctcaagggcaccggcgtgccgctgatcgctgacggcggcgtgcgctactccggcgatgtggccaaggccctggcggccggcgcccacaccgtgatgatgggcggcatgttctcgggtaccgaggaagcgccgggcgaaaccttcctgttccagggccgttcgttcaagagctaccgcggcatgggttcggtgggtgcgatgaaggatggcgcggcagaccgctacttccaggaagacaacaccgccaacgtcgacaagctggtgccggaaggcatcgaaggccgcgtgccgtacaagggctcggtgatggcgatcatccaccagctgaccggcggcgtgcgtgcctcgatgggctattgcggcagcaagtcgattgccgactggcacgagagcgcccagttcgtccagatcacggcagccggcatgcgtgaatcgcacgtgcacgacgtgcagatcaccaaggaagcgccgaactaccatatcgactgacgcgcagcggctgcgccctccgcctcgcggcggtgcgcggccgcaagatcgtcggggcgagggcgcattgccgcgggcggcgccttcgcctgaccggaatgccatccggccggccgctcgccaagccggtgttgcctgaacgtgggccgcacccgccggccgcaccatcggccgggcccatgacgaggagcgccaatgaaggtattgctgcgagccgtgctgttttttgatgccctggtggatttgatgctgggcatcctgctgttgatgtccccgttcaccacgctgtatgcggcgctgcagttgccgcagccgcaaccggccctgttcgggcagctgctgggcgtggcactggtcggcctggccgcgctgttgtggcaggcaacgttcaacggccagctgacggtgccagtggcgcgcacggccggctatgtgaacctggccagcgcagtgctgatcattgcctggatggtgttcatggaactgccgctggtcggcgcgggcaagatctggctgccggtgatggcagtggtgctggcgttttttgcgctggtgcagattcccgcttccaggcgcgtgcgcaaccgcgaaaggcagctgaaggccgagcgtgcgctgcaggaacaggaacacaagaaggaagtccgcaaggaacccggcgtcgcccccgcggcgcgcccaacgaataccccagaataccggcgcgagccggtcatcacgccgccgccgggctatggccccggcacggaagtcgtgaccgagcccatcccggaagacacgccatcggcccatcatgcacgacaaaatcctcattcttgatttcggctcgcaggtcacgcagctgatcgcccgccgcgtccgcgaggcgcacgtctattgcgagatccacccgaacgacgtctccgacgacttcgtccgcgagttcgcccccaaggccatcatcctgtccggcagccacgccagcacctatgaagaccaccagctgcgcgcgccgcaggccgtgtgggacctgggcgtgccggtgctgggcatctgctacggcatgcagaccatggccgtgcagctgggcggcaaggtcgagtggagcgaccaccgcgaattcggctacgccgaggtgcgcgcccatggccacaccaacctgctcaaggacatcgaggatttccgcacgccggaaggccatggcatgctcaaggtctggatgagccacggcgacaaggttgccggcctgccgccgggcttcaagctgatggcctccacccccagctgcccgatcgccggcatggccgacgaggcgcgcggctactacgcggtgcagttccaccccgaggtcacgcataccgccaagggccgccagatgctggagcgcttcgtgctcggcatcgccggctgcaagcctgactgggtcatgcgcgaccatatcgaggaagccgtcgccaagattcgcgagcaggtcggcgatgaagaggtcatcctgggcctgtccggcggcgtcgactcgtcggtggccgcggcgctgatccaccgcgccattggcgatcagctcacctgcgtgttcgtcgaccacggcctgctgcgccaggacgaaggcaagctggtgatggaaatgtttgtcggccgcctgcacgccaaggtcgtgcatatcgacgcctccgaacagttcctcggccacctggccggcgtgaccgatcccgagcagaagcgcaagatcatcggccgcgagttcgtggaagtgttccaggccgaggccaggaagctgtccaatgcaaagtggctggcgcagggcacgatctatccggacgtggtggagtcgggtggcaccaagaccaagaaggccaccaccatcaagagccaccacaacgtcggcggcctgccggaaacgctgggcctgaagctgctcgagccgctgcgcgacctgttcaaggacgaagtgcgcgagctcggcgtggccctgggcctgccgccggaaatggtctaccgccacccgttcccgggcccgggcctgggcgtgcgcatccttggcgaagtcaagcgcgactacgccgacctgctgcgccgcgccgatgccatcttcatcgaagaactgcgcaagaccctcgccaccgaacaggacgccgccgcgggcctgtgcgagccggaccaggtcggcaagagctggtacgacctgaccagccaggccttcgccgtgttcctgccggtcaagtccgtgggcgtgatgggcgacggccgtacctacgactacgtcgtggcgctgcgcgcggtgcagaccaccgatttcatgaccgcgcactgggcgcacctgccgtatgcgctgctaggccgttgctctaaccggatcattaacgaagtacgtggcctgaaccgggttgtgtatgacgtgtcggggaaaccgccggcgacgatcgagtgggagtgaaatcgggttcttcggtgactatcgccggccagcggaacaggttggcggtagaaccccagggccggattgaagccctcccgttcagatgccgctgcggccggggtcaagcgcgaggatattgagcgtgatcggtcaagcccccaaggcgcgtgcaaagatctctgactacctctcaaagcggtatctggatatcttccaggcgtagtccagcacgtcgcgggtcatcacggcatagggcgtcccgcggcgctaccctgtcggggacgcatgtcacgcaaaacacctctgcgagcggcttgccgttgacttcgagggggtcctgggcgtttgccaccgatgacagcttcaggccaccctaagcaggttcccatgtctggcccagtgaccggacgcactcatccacgctcagttcatgcagtgactcgcgcggcagcgtttcgctggccgcgcgtgtcaggacagccagcacgggcggcttaagccgcaccagcagcaggcgctggcctttggcggccacctcggacgcgaaagtatgcagcgcctcgatcgtcgagccatcgatgtccggcgtctcctccatgctgaaaacaagcgtatggagccccggcccggctgcctcgtgcaggtgtcgcgccctggccagcatgcgttccgcattggcgaagaacatcggcgcttccggccgaacgatcagcacgcccgacagagtccgggcttcagggtgagccgcgatgtcaacgtagtcgtggctagagccaaggcgccccaattcgctgactcttggttcggagaagctacgcagtgtcagcatcaggctgatcccgattgccaccagcagtccgtcgagcacgccaagcaggaccacggcgacacatgcggcaaccaccagcagccggtcgcggcgccatgtccagtagggcctgaatgcatcgagacgcaacgtatggctcacggcatgtatcacgatggccgcgagcacgggctcgggcgtgcgtgcaagctgcggcagcagcgcggcaacaatcagcgcgatgactgctgcggcgcaccaacccgccaggcgagactgtgctccggctgcttcatttgcagacgtggcggaatagcccgccccgactgccatgccatgtagcaaaccggagccaatattggccagacctagtgcgaccaggtcgcggttgggtgaggtcacatcaccgtacttgagcgcaaagctgcggatcgagccgtacgattccgcatacaggatcagcaccagcgcgaaggcgagctcgccaacgcgcaaccactgtatgcgctgcaggtcgggcaggccgatggtgacatttgccagatcaatcgtgcccacttcggcaatgccgtagtgcgacagatcggtggcataggctgctgtgatgcccagcacgatcaccaccagcggtcccggcacccgccgcaagcgcgccagcgcgaacaacaaagccagcgccgccaggcacgcggcgagcgcattgaggttccaacccgccgattcgtgcaggaactggtaagtgaaacgtggcaggtcgctgtgcgtcgggtggatcccggcgatgctcgaaatttgcctgagaatgataatgaccgctagtccgaatgtgaagccgcgcagcaccggcttggcaatgaagtcggtaatgccgcccaaacgcgctatgcccgccagcaccaggaagacaccggccagcgtcacgaacccggcggcgagcgccaggcgcagcgcggcatcggcaccgctagtcgacagcgtggccgcggccagcaccgcagcagaagatgaggtggccgacaccaccgcgaagcggctcgtgcccacaatgccgtatatcaccagcccgactagcaggccgaccaagccagcttgcgcaggcagattggcgatgccggcgtatgcaacggcttccggcaaaagcagaccggcaatagagcagccggcgatcacatctcgcccgagccgttggcttcgtgtcagcgccacgtcattggccctgccggtatccggcggggtggacgaaccgggggcatcagacgcaggacacatagtcgatgtagttcgggcgatcggcggtccgcttattctgccactgatagatgccatcgaaatgacttcggcgtcgttgcacacggagcgcccttatggcgaccccgccccaacgatgctcgccagccaatcgaacttggtccttccgtccacagaagttgtgagtgcaagcatcacgtctgaagacttgaacgtcccatccctttggcttgctgacgaggaacgccacatgcattcaatcctattccaccaggcaatggcactgaccttggcggcgaccgccatggccctgtgccatgcgcaggaattgccgctccaggcaccgcgcagatccgcgaatcggccgggatcctttatgtttccggtggcgtcggcacggaagacgtggcgcgcatgaaaaaaactggcgccgcgctttaatgccagaatccgcttccaggacaatgccactgggcgtggatgcccgcgcccggcgtccgggtcgtcaaccgcaaccacacgtggcccgcctgcgcttcgtcgaggcggttcttctctgcttcgttgctcatggcgattctcatctcgcaaggtggcgggcgccaggtgcgtaccgggcagccatcttatgggactcttgcttgcatacgtgacgattcaatggcgaataccaccagcatgccgcccaggattgagacattcttcagaatgtggttaagctgattcatgaagtctgcgggatcggcgcgccagaagccatggaagatgatggtggtgggtaccaggaacagtgcaagaagcagcgcgcccaagcgtgcgctccagcccgagatcaaagtcagtccaccaccaatttcaactgcgatggttagcaccagcagcaaatccgggctcggcagttcagcgctggcaatccacgcagaataggccgcgaagctgccaatcttcaggagtccggaaaataaaaaaagagagccgagaagcgcacgaccgacagagtacgttcgtgaaacgaccgtgggcgcgagtgacatagtggtcatgaccatctccaaaacgaagagcggttgcagccaagagccagtccccaattaggagtcccgctccttttccttgccggtgccgtcatcccaagggcggaccaccttggccgagcgtggcgagccgcccgagataatccgtgcagcggccgctgacgggcgaaggatcgaacggacgattttccggtagcggtgcgccaccttcatgagtgccgggagcttgatccgcttcacggtgcggacgttcagtgctccctgcacgccggatggccgcgatcagcatgtggctccgcgccgccagcaaagtctcctcaaatcgcgccattgcctctgacagcagattcaactcgacctggctcttggcgtcgtccgccttgcaagcatcaatctcggtgtagatgcgcttgccgagctcacgcacgagaacaggatcgagctgtccttgagatgctgcgtgactcaggtgaaacagcagggtgatcaatccgttcggagtggaacggggtggcgaagctgtgctcatttgttgccccaacattgcagtctccacatttggcaagccactggctataggatctggaaaatcccggagttttggctacatcaaagaaaagattgacaggccattggcccgcaacgatgcgtgccggcttcgtatgcgtttggctgtcacgacacgtgcgccgccttgcagccggtgcccttcgcaatgaggcctttcttatgtgggagtcgggtactggggcgttcgtgtccgtgcgtgcagccagtctcgttccaggtggatcaggttgaaaagaaatgtgaggtccatcggctcggcttcggccgtaatccattgctcgtgatcgacgtcttgataaatcagcgtcaggtaatagcggccgtgaggcagtttgaggtagaccaggggaccgtccgagaccagccgtagcaggcggttgccctgttcgttgaccaggatcagtgtgacgccagaaacggggttgccttctgaaggatcctggaagctgagccgcacattgaattggccggcgatagcctgcatttgccgcaagccttcgcgccccatcccgcccgagacataccggacgccagcggattggtggatttccggcggcgttggatgcgttgcgaggatctgcgcgtggagaagcggtgcggtaccaaggagcagcgcggcggcagctgcacgctcaaccttgctggcgcgcattgcaagtgatcgatggtggctaacgggagcctggaggttttcctcgtgtccacgctgcagcttcgcggtcatgacaatcctcctttgcggcgcgcaaaatatcgcccgtctattttgaagcgtaggtcgcatgcgcactgtcccattgatgcatcgcaaacgagataccaaatacattcagccgccttcccctgggagcagtactcggtggcgaactcgcggatcgcgccgtcagaggtttgtcctgagcccatgtaaccggcgatcgtggcggcattgccggaacgggcaatgcgcacggacgagtgcgtgtgcgcacacccggccgtattgcctgagcatgcggtatcccagttctcgatgaccgccgacagcttcatgtcgcgcactggcgtatatagaagtggtgtcccctccatgccctattggcttctgtgggaagagcggcgcctgtgctccgtggccaacggggtgatggaattctgagttggcgagcaccggtctcccgctacagcttgcaccgccggctccaccatttgtccagctccactgcaatcgtcaatgtgagcgcgagcgacaacagtccagcccacgtcgtagccgacacaggtgtgagaccgagcgtgtcgcttagcccgggtatgtacatggcagcgatatggagtaactgggcagccagtacgctgaccaccagcatcggattggcgaagaccccctgtcggaatacggagtggcgctctgaacggctactaaacgtctgcaagttctcaaacagcacaaacagcagcagcaattggttgcgtgcctcgtttaggggatagccgcggtcgagcagccagtagaaagttgcaaatccccctacgcccatgacaagagtcgaatagcagatgcggcggatcattacgcggtcaaagatcggctcccggggcttgcgcgccggatatgacagttcgtcgccttccgcatgctcggtagccagagccacatcctggatgccattggtcacgaggttgagccacagcagctgcaccggcagcaatggcattggcaggcccaggggaatcgccagcagaaacagaaccatttcggccgcgcccgtggaaaccaccatgaagatgactttgcgaatgttcgcgtacgccaccctgccttcatttatgccgttgacgatggacgcaaagttgtcatcggtgaggactatgtctgcgctttccttcgctacttcagttccctttcggcccatggccacaccgacgtgtgcgtgcttgagcgcaggagcgtcgttgacgccgtcgccggtgaccgccacgaaatggccggttcttgccagcgacaggacaatggacagcttctgatccggactgacgcgggcgtagatgcgcgcacggcgggtcagttggtcgagtccgtgcggccccttgctctcggcctggcgcacctgctcgcccgtcacgacctggtccgtggtaaagcgcagccccgcctgcgcgccaattgcgctggctgtcaacggatcgtcgccagtcaccatcgccacgtcgatgccggcgctgtagcagcgtcggatagcgtccgggacctccgggcgaaccggatccttcatgcctgccattcccagaaaggtcaggttgaccaggtgcccgtgtccgtaggacccgtccggctccgcatcaatcgtgccttctgcgaacgccagcacgcgtagtccttgcgcggccagcgctgccttttcccgaagcagtccttcgcgccggatcggcacggcatggccgcgaacgtccgcctggtcgcacatggcaatcagagtctcgggcgctcccttgacgaacacgcggatcgtctcttcgtgccggtggaacgaggccgcgtaccgcaggtctggctcatacgggatacgggccaccaaggggtaccgctgtcggatctcattggctacggtgccccccttgtgcgctgcggccagcagcgccacgtccacgctgtccccggtgccagtccagccatcacgctccctggatagttgggcctcgtttggcagcgccgcggcccttagcagggccgctacccgcgttctcgcgtcatggtcggtggtgccggcggcgcggatcgtgcagttgtccagatcgtgtccgacgtcgcagcaaaacgccgtgccgtcgggaagccggatatcggtgacgacaagctcgttcatggtcagggtgccggtcttgtcggtggcgatcatcgtgcaggatccaagcgactccacggcgggcattttgcgcacgatcacatgggccttcgccatccgccgcatgctgatcgccagcgccaccgaaatggcgacgggcagtccttcggggatcgcgcttaccgccagtccgaccgacatcatgaacagttcgcgcaatgccatgccgcgcagcatacccaccaacaccagcaacgccacagccacgcctaccgccaccgcgatcagtcgggaaaaacgctggagcctgagaatcaaaggtggctgcgagatggattcgcggcccagttcccgcgcaatccggccaatttgcgtggcagcgccagttgccacgacgatgccgtggcccctgccgcggagcaccaccgtgccggcgaaggtcaggcactggcgggcgctcgctggggcgttgctggcatcacatgctgagagcttgcgcaccggcagcgattcgccagtcagcagggattcatcgcactgcaggtcaatggcggaggtcagttccaggtcggccggcactcggttgccggcttccagcaccaccaggtcgcccggtaccagcgtacttgcatcgatctcctgctggatgccgtcccggatcaccgtggcacggggctgctccatcctgcgcagcgccacggccgccttgtcggccgtatgctcctgtgcggtgccgatgacgccgttaatcagcagtactgccccgatgaacagtgcatccttcaggtcacccaacgcgagcgacaccgctgccgcggccaggagaatgtaaataagcggactgaggaactggcgcagaaacaccgcggccaccgacctaggggccgcctgaggcagcacattgcggcccacctcggccagccgcgcattagcctgcgcggtggtcaggccgggtgggacatgtcccggatcgacgcgatcccgggtgccggaatgttcttcgtgagatcgggggcgatccgtttgcaacgcgctggagcgattttgcatgaggtttcccaaggtatgccgggcgcggagccacgcgtgcacaccctgggcgtacgccacgtgcggcgggcgggtccggacactgttcaagcgtaggtactcgcgtttccgcatgattgatccggatcaaccaccacccggttccccctcctagactggctgtatcggccagcggcacccgtggcggggccaacggccttgcgcaagcgtcaaaggacaccagcatgcaactgcaattcctcggcgcgaccgatacggtcaccggctccaagtacctgctcgataccggccgtcaccaggtcatggtcgactgtggcttgttccagggatacaagaccctgcgcctgcgcaactgggacccactgccgctcgatccggccaagctcgacgccgtggtgctgacccatgcccacatcgaccacagcgggtatttgcccctgctggtgcgcaacggcttccgcggcagcgtgcactgcaccatgggcaccgcgcagctgtgcggaatcctgttgccagacagcgcccacctggcggaagaagacgccgattatgcgaaccgcaagggcttctcgcgtcatcggcccgcattgcctctttacacagcagccgacgctgcacgagcaatgcggcggctccagccgatgcagttcggcaagcgcttccaggtagtgcccggcgtagaggccgagtttgcccgggccggacatatcatcggcgcggctatcgtcacgttgttcgtcgacggcaagcgcatcgtcttctcaggcgacctcgggcggcagcaggacatcgtcatgcgcgcgccggagatggtgcgtcaggcggattacctgctggtggagtcaacctacggcgaccggcggcatccggacgacgacccgctcgatgtgctcggcgagatcgtcagccggacgattggccgcggcggcagcttgatcatccccgcttttgcggtagggcgcacgcagagcctgctgtactgcctgcaccgcctgcgcgaactcaagcgaatccccgacgtgccggtgtacctcaacagcccgatggccatcgacgcgaccatgattttctcgctgcatccggaagagctgcgcatcagccgcgaagagtgcgccgcagcctgcaatctcgccaccccggtgcagagcatggagcagtcgatctggctgaaccacgaccgaagtcccaagatcatcctggctggcagcggcatggctaccggtggtcgtgtggtccaccatattgccgcctacggcccggaccctcgcaacaccgttctgctttccggcttccaggcggcgggtacgcgcggcgcagcgctggccgcaggccggcgcgacatccgcgtccatggcaaggacatcgccgtgcatgcgtcggtggagcaggtggagaacctgtccgcacatgccgatgccgcggaactcatgacctggctcggcggctttcaccaggcgccgcggcgtacgtttgtcgtgcacggcgagccacaggcaagcgatgcgctgcgccagcacatcgagcgcgacctgcgctgggcggtcaccatgccggaatatcggcgctcctatccgctcgactgatccaggccggcgcctgatatgtgcgcctttcgttacgtctgccaaaccggaatcacgtcatggacttcagaaccatcctcgtcgacctcagcgaagattctgcccggtcggcacgcattgaaacggccgcacgggttgccgcgaaattcggcggcagcgtggtcgggctgactgcgactggaacaaacctggagccgtttcgcggggcgggcgaagaagccggacaatacgcggcccttgccgccagccagctgcacaagctggttgccggtcacaaggagaccctcgacacgctgaccaggcaagtgtcgccggacatccccacccggcacatcattatcgacgctgaatccggttgggcgcttgccgacgaggggcgtttcgccgatctcatccttcccgcaccgccgtcggcggatgccgatgtgccggcgctgctggccggggttgcggagtatgcgatgctcaatgccggacggcccatcctgctggtgccgggcgcggccggcccgcgctttggtggtcatgtcgcgatcgcatggaacggcggtcgagaggccgcgcgggcagtagcggacgcattgccgtggctcgcgcatgccagtgctgttaccgccctggtggtcagcgcggctgccattgacgaagagacctgccgtgacagcgggaaccggctgacagcgtggctggccagccatggcatcaatgccgatctggttgtcggggagggcgaccccgaccacgttctgccgcaacttgcctgcaaggtacaggccgacctgctggtcgccggcggctatggccgttccaggctgaaggagctggtgctgggtggcaccacccgcgccctggtgcgtcagtcatcgttgccagtcttcatgtcgcactgacgggtgaccgctgccggtggggcagtggcagcgcatggcctggccgcaggctcgttcggccggcacattgcgtgccggccgaatgttggcttgccgacatacccgagccgcatcctgagctagtttccaacgtgcgtggctcagccggtgtcggcacacgggttgtggctccgacgtcgccggtacctgcgaatttccggttctgagccgcatctcgcttcccatgccgttgcctttccgcgcacaaactctatagtccattggcaaggtaatagtgacgagagcatgcccctgaaggcgtcttcatccgctccgcaggcgagcagccttgtccagagttcgcccgacgatggctttcgcctggtcgtgcgatttccgcgagagcaggggaacgggcatgacaagggtgatgattgcggatgaccatgctgtggtacgggatggcctgcggcatatcctggaacgggccggtgtgttcgaggtcgtcggcgaggcggcagatggtacacaagtgcccaggatggtacgggaatgcaccccgcaggtgctcctgcttgacctttccatgcctggcaggagcgggctggaactgatccgcttgctgcgcggcgagcacccggccctgcgcatcctggtcttgaccatgcacgccgaggagcaatacatcgttcgtgcgttccaggctggagcggcgggctatctgaccaaggaaagcgcggctacggaactggtgtccgccatcggccaggtagcccggggcggcacctatgtgagccagtcgatggccacgaagctggcaagcgggctgaaggaccagagcgacgacctgccgcacctgaggctctcggaccgcgaactggaagtctaccggcggctggtgctgggcgagcccatcacggcgatcgccacggcactgtgcgtcagcgccaagaccgtgagcacctacaagatgcggctgatggaaaaaatgcagatgcccaatgaagccatgctgttgcgctatgccatgcgcaatcatctgttcgacgacgatgcggacctgtagtgccacagtgcagcgtcggtcggccgctggctttgtgccctatcgccccgaagtcgcagccagcccggccagggtctggcgcagcgcatcgagttccagcgtcttgtcaaagcagtagctcccgcctgccttcaggcaggcgcggcgcagcggcgggccgaggttgtcggccagcacgatcacgatcgaatccggtagcgtcgacctcagcgtcctgacctcctggagcgcatgagcatagcccgtgcccaggctgatcaggacgacgtcggggcgatgacgcaggagcggggcaagttccgtggctgcgctggcgcccgcacccgcgacacggatgccaggcattcgcccaagcaggccgagctgcctggttcggatcgcattggcatgctcgagcaagtacacggtaagcaggcgggcaggattgcggtctggcatggtcctagtatcgcggctccccttgcggtggcaaatcaggggcggctgagagtcgcgtcaggggggcagaaggcactgtcagtgatccctgacatgcgcgcgcacgccttgccggcttggcaggagcgagtacgacagtttcgacaagcaagccggctgggtggcgtctgcaaccgaggttgtcggctaccggcttgtctcaggaaagcggccgccgccggcagtgcgcctgaaggcgatcgaaattgccaacgccttgcgcgcgcgtgccgattgcgatgcctcaaccctgcgtgcgaacgctggcattctcctcgcgcagcgcaaggtgcagactgacaccgtcggcgccggccgcgatgctggtcctgaagccgcaggtgcgcgccagcgtcagcatggcccggttgtgctgcatggtgcagcccaccagcgcgccgatgcccttttcgcgcgcgtagcggatcagcttgtcgagcagcagctttcccagcccttgtcccttgcagtccgagcgcacggcgataccgaactctgcctggacattgtccggatccgcaaccgcccggacctctcccaggatggaagcctggccacatgcatcggtagtcgtcgcgatgaacgccatctcgcgcgcgtagtcgatctgcgtgagccttgccaactggctgtgttccggctcgcggaacgtgcagaagtagcgtgcatggatatcttccggcgtcagctggcggaagtacgcctggtaggctgcctcgtcggtcgggcgcacgggccgcagcacaatggtgcggccgtcctgctcgacgcgttcctccagcgcttccggatagggttggatggccagccgcgtgcccggcgccggcgccttgatggcgatgcgggcatcgagcgcgatgacgcctgtcgcgctcgccagcaggggattgatatcgagttcggcgatctcgggaatgtcgcagaccaggcgtgatacctgtaccagtacctggagcaagccgtccccgtcgacgcccgggtgtccgtgccagccttccagcaggcgcccgatgcgggtgcgcgacaccaggtcttgcgcgagcagcgcgtcgagcggcggcagcgcaaccgcatggtcgccgatgtgttcggtgttgacgccgccatggccgaacagcaagacggggccgaacacgggatcggtggcggcgccgacgatcagctcgaagccatcgccgtgcccggccatcggctggacggtgaagccctccagccgtgcctccggggcttgctgccagatccgctcgagcatggcgctgccggcgctgcgcaccgcggcggcatcggcgaggtccagtgcaacgccgcccgcggcagacttgtgcgtgatgtccggggacaggatcttgagcgctaccggatatccgatccgtgtggcctggccgacagcctcatcgacgcttgccgcggtccgggtcgcgaccacggggacgccgtaggcggccagcgcggccttggcctccggttcggtcagcaacgccctgccggcgcgcagggcattgccgatgatcgtgcgcacctgttccttgtcggcctgcgtgtacgtgtcgtctgcgggcggcgtgcgcatcagcaattgctggttcctgtggtattcgcaggcctgcaggaagccgcgcactgcccgctccggggtatcgaaggtcggcacgccggcatgccggcacaagcggcgtgcctgcagcacggcatccgccccgagccatgcggtcagcagcggcttgccgcccgacggcgcgctgacgagcgcggctgcgatctcggcggctggcacgatggccgtgggcgcatggatcatcaacacagcgtcaacctcgggcgcctcgcacaggatggcgtaggcctgcaagtagcgctcgacgggcgcgtcgccgatgatgtcgattggattcgcgcgcggccaagtggcgggcagcaccaagtccagccgggccagggtctggtctgacagtcgggccagggtcccgccggcatccgccagcgcatccgtcgccatcacgccggcgccgccgccattggtcaggatggcgaggcgctcgccgcgcagcccttgcatgcgggcaagcatctcgacggcgtcgaacaggccctcggtgctgtccacgcgcagcatgccggcacgccggatggcggcgtcgtagacgtcgtcggcacccgccatggcgcctgtgtgggacgcggcggcgcgtgcagcctgcgccgagcgtccgcccttgacgatcagcaccggcttgttgcgggcggcggcgcgtgccgcagacataaactttgcgccatggcggatcgcttccacgtagagcaggatcgcatgcgtcccggcgtcgccggcgaggtagtcgagcacgtcggctgcgtccacatcggcactgttgcccagcgagatgaaatgggaaaagccgatctgccgcgagcgcgaccagtccagcacggcggtggccagcgcgccggattgggtggcgaatgccagcttgccttggcgggccgcgccgggcgcgaagctggcattgaggctgattcccgaagcgatcagcccgacgcagtttggcccgagaatcctgagcagatggggccgcgccgcgtccagcatggcctgccgcagggcgcctgcggcactgtcctcaggaccctcgaagccggcggtcagcacgatagccgcgcgcgtgccggcggcgccaagctcggcgatgagccccgggatggtgggcgcgggcgtgcatagcaccgccaggtccggcggtgccggcaacgcgccgacgcgcgcgtaacagggctggcccgccagcgtcgcatacttcgggttgaccaggtacagctggccggtgaagtcgcccgcggacaggttcgccagcaccgttgcccccacgctatgcggccgcagcgtcgcgccgatgagcgcgaccgagcgcggacggaacagggcatcgagattacggacagtcatggctggccctcatggcaaccggcggcaaccctcccgacagggcccggtcgggaagtcagagattcacctggatgatgttcgatacttcgctcaccccaggcgccgcccaggcggcttcggaagcggcctcgcgctcggcccagctgcgcaggctaccgcgcagcgtcaccacgccgtccttgacgtcgaccgcgacatgggtcgcgtcgtccgccgcctggcgctcgatggccctggcgatccgttccttcacgtcgtgggccgcgatcgcaggctggaccacgatggcgttggctacactgaccacgccgtacaggccgcccaccgcgtgctcggcggccaggcgctggtagttccagtcgaccgtgccggtcagcgtgacgcagccgtcctcgaccatcacctggatgcgatccgcgggcagcaccgaggtccacgccaggatgttgctcgctgcgcgtgcgatgtccgcgtccgtgcgctgcgcgtcatcgggcaggcgcacgtcgatttcgacggccaggcctttcacgccgggcacgcgcctgacggccttctcggcagcgtacttgccggcatggctgctgagatggccggtcagcgtcaccacgccgtccttgacctggacaccgacctcggtggcatcgacggccgggtcccaggccagttcctcgaccacatgctgcttgagctggatatcgcctttcatgttggttgtctcctgtttgcctggcgccctcgggcgcgatcgcggcgcgtgccgcctgctccgtgcgtgccagcgcgggcacgcggcatcggcgtcacggccgcgtttccagctgatcaatgaccgccgagatgcccggcgccgaccatacggcaccgatggcggcgcggcggtcggccagcgaatccacgtggccgctcagcgtggcggtgccgttcttgaccttgacgctgatatggtgggcctcgcgcacggcatggcggagcagcgcctcttcgatgcgcttctccacgtcggggggcgcggtcttctcattcatccggatgttgttgacgacgccgatcacgccgcgcaactggctgaccgtgcgttcggccagctttttctgatagccccagtcgacgttgccagacagcgtgacccagccgcgctcgacgcggaccttgatgacgtccgagggcacatgcacgtgccattgcaacgcaccgcgagccgcctcggcaatggcctcgtcgaggaaggcgccgggcggatgcacgtcgagcttgacgacgaccgctcgtacgcctgaaatgcgttccgcggcgcgctcggcggcgagcttctccgcatagctggacaggtgtccgtccagcgtgacaatgccctcatggacctcgacgccgatggacgccgcgtcaatcgccggatcccagtcgagttcctcggtgacgtccttctggatctgatgatctgttttcatgcttggcctcttcaaaggcagggcgccgcaagcggcgccacgggttggccccggtgcgtctctgggcgctacgtttgcgatagagcctgtgcgctgccagaacgctctcgttcctgcgccttgcgcaccagcgaaaacagcatgccccagtcggttgcgagagcggcgaacagatcatcgagcgcaaccactccggtcactgcctcgccatcgagcaccgccaggcgtcgtacgccgtgcgtcagcatcaactgcattgcctctgcgacaacggcatcccgttggatcgccaccaggccacgcgtcatcacctcgaccacgtcggtccggcatggatccgcaccggtggctgtcgcaccgatgacgatgtcccggtccgtgaccatgccgaccgcgcgcgtccctgccggtgagttctctgtcacgatcagcgcaccgacgtggcggtcccgcatctggacggcagcttcctgcagggtgcaggacagcgggacatgcacggctttcgctgagcaaatatcctggactagcatcccggtctccttttttgcgcaacgttgcctaacggacggtaatgcgttgctggcttgagctttccttcttgggcagcaccaggcgcagcacgccgtcctggaagctggcatcgatcttttccgtgtcgatgttgccgtccagcgtaaaggcacgctgcatcgagccgctgtagcgctcctggcggatcacgcggtcgccttcttttacctcggaagctttctcgagcttggcggagatcatcacagtcccacggtctacgctgacgttgatgtcttccttcttcacgcctggcaggtcggcggtaatggtgaagctgctgtcggactcggccacatcgaccttgaatggcagctcggtgtctggcccgatccgccaattgcgtagcatgctctgcagcatgtcgccgagcggttcgatcgagaacgggtcgtagcgcttgatgttgctcatcatggtctcctggatgacggcgccgtgcgcgccgtgttttcttactttggcaagccggggcggttgcggtttgctttgcatcaaacgccggcacattgccccgactgcttgcacgggataagggcatgacgtcacatgcgccagcttggacagccagggcgttcggcatgaccggcgtcagggaaccctgacaagtgacgctgcatttctgacacgcaactcagcgcagccttctaggcgcggagcgcgggcaggccaatacttcagtcaaacacatcgcggcgcgcacgaatatgcggtccgccagacgacacgggtgaaggcgagggtcgggataagggaaaggccggcaggctggagacaaccatgtttgacttgcatactgaagctgatgctgtttgtgacgcccccaacatgtccgtcgcgctctccaggcgtgaggatgagacgtttgcggagccggcgccggatcccgcgcgggcgcggtgcacaacttgcatgatgcggaacatctgcatggccgccagcctggaggccggcgaaatggcccgcctggactccgtcgtgcggagctggcgttcggtcaagcagggcgaacggctgtaccgggcgggcgacccgttccgcagcctctatgcggtccgcgtcggctcgttcaagaccgtggtggcgccggagcggggcaaggagaccatctccggcttctacatggccggggactcaatcggcatggacggcgtttgccaggaaacccataactgcgatgcgattgccctggaagacagcgtggtctgcgtgatcccgtttcaccagctcgaggcgctatgccgcgagatcaagccgctgcaacgccacctgcacaagatgttcagtgccgagatcgtgagggaatcgcgccagatgatgctgttaggcaacaacatgtccgccgagcagcgcgtggcggcattcctgttgaacgtctcggcacgctaccgcgaacgcggctattcggccacgtcctttgtgctgcgcatgactcgtgaagacatcggcagcttccttggcatgaccctggaaaccgtgagccggaccttgtccaagttccagcaggaagggctgctgacagtgcagggcaagtccatcgagctgctcaatctggacgccctggacgctcgctagcggcgtcatacgcggcaaggcatgacgtgaacgatgccagttctgatcccggaattcccggccgtcccggcgatgtcgtggccgccgccgcgccccgcgaagtgggggcgctggtgttccggccgctcgagatcgatacgtggcaggagcatgtcatctatatgcatccggattgccccgtctgccgcgccgagggcttttccgcgcaggcgcgcgtgcgcgtgcagatcggcgacaggtcgttgatcgccacgctgacgctgctgggcgcgccgctattgaacacgggcgaagcgagcctgtcgttgagcgcagcacggacgctttcggcacgcgccggcgatgtcgtgcatgtcacccatgcgcccgcgctggagtcggtgcgcgcactgcgtgccaagatctatggctgccacctggacagcgtccagctcgacggcatcatcggcgacatcagtgcagggcggtacgccgacgtgcatattgcggcattcctcaccgcctgcgcggacggtcgcatgagcctgcgcgagactgtcgacctgacccgggccatggtccggtccggccagcgcttgaactgggaccgcgaggtggttgccgacaagcattgcgtcggtgggctgccgggcaatcgcaccacgccggtcgtcgtggctatcgcggcagcggccgggctgctgctgcccaagacctcatcgcgcgcgatcacctcacccgccggcaccgccgatacgatggaagccctgacccgcgtgacgctggattcgacggaactgcggcgcgtggtagaacaggtcggggctgcattggtgtggggcggcgcgctgagcctgagtcccgcggacgacgtgttgatccgcgtggaacgcgcgctggatatcgacagcgatgcgcagctggtggcctcaatcctgtcgaagaagattgccgccggctccacccacgtgctgatcgacgtgccggtggggccgacggccaagatccgcgaagacagcgatctggcgcgcctggatctcgccatgaccaaggtcgcggacgcgttcgggctgaagctccggattctgcgcaccgacggctcgcagccggtgggccggggcgtcggccctgcgctcgaggcgctcgacgtgctggccgtgctgcagtgccagccgacggcgcccgccgacctgcgcgaacgctcgctgctgctggcgggcgagctgctggagttctgcggtgcgataccgcccgggcagggacggctgctggccggcagcctgctcgacagtggtgccgcctgggcccggttccaggcgatctgtgaagcgcaaggggggctgcgcaccccggggcaggcggtgttccggcgcgacgtggtcgcagcccgcagcggcatcgtgacgtccgtcgacaaccggcacgtcgcgcgcacggcgaagctggccggggcgccgcgccggcaggtggccgggctggaactgcatgtgcgcgccggcgacgaggtcgtagccggcgcaccgctctgtacgctgcatgcccaggcgtccggcgaactggaatatgcgttcagctacgccctggcgcatgaccccttccgcatcgaatagctccagtgggcggccggcagcggccgcccgcaccagcagcaccggcaccgtcgatctgcacacctccccctcggccacgctgcccatcaccaggtgccggaagcggttcccgggtgcgggagcgcagacattgcttccggcttaggcggggggtaggccggttgatgcgggtcagcgggcgggcggtcggccggccaaggggactctgggcttcgttgacagccatcaacacgcatgcgcttgcgaccgctactttggaaatagcccatagccgaagccgaggtagctggggggagaggcaagacatgggcctgaaccagccattgctgtcgtggaatgaagaagatgcggggcatttgtccaggaacgtgccggctggagatcgctcccccggccgtgccggccccgttggtgttgtttgtactggcgtaacaggtgaccaaatatggacgaagagaccagacagaagatcctgaccttgttgaaccaacacaggatcatgacgcttgccaccttgaggccggatggctggcctcaggctaccactgtgggttatgtgaatgagggtctcacgctctacttcctctgtggtccgggcagccaaaaggcggccaatctggcattggatgaccgtgtctcgctgacaattgatcacgacacgccagatctcatggcgattaccggcctgtccatggcggcgcacgcgcaaccggtggtcgatgtggccgtagcggagagaatcctccggatgttcccattgaagtatccggagcagattgccttgccagtgccgatgccaaccgcggaggacgtccgaatattcagggtgaccccgacagtcatttccgtgctcgactattccaagggcttcggacatacggatcttgtcagctgctgacacctgggtccgctgagggaagtcaagagacctttcgttgcggaggtgtgccgtgcgcaagatgtgggcggtgctcgtcatgccagccattagtctgtgccgctgcggccagcgccctcggtggtgccagttgaacctgcgcacggccgcgcgaggcctgcttctggtgctgactgccttcgtgtttcccggagccatcgccgaggttgccgttccgtcattgacggcgcgagtgactgacctgactggtacgctaacgcgcgcacagcaggcgtccctggaccagacgctgcaggccttcgaagccaggaagggagctcaggttgcagttctcatggttcccactacccgaccggaaaccatcgaacagtattcgcttcgcgtggtcgagcaatggaagctgggacgtaaccgcgttgatgacggcgcgctgctcatcatcgccaaggacgaccgcacgcttcgtattgaggtgggttacgggctcgaaggcgtcctgactgacgccgcgagcaagcgcatcatcagtgatgatatcgtgccccgattcaagcggggcgacttctatggcggtgtgtctgcgggcatcgaccgcatgcttggggtcatcgaaggggagccactgccacctccggaggaaagagcaggggatacgggtgaccccgtccggcaactgatgccaatcctgcttgtgctcactctggttctgggtgggttactgcgttccatgctggggcgcttcccgggtgcagtcgcgacgggtggggccgttggagtggtcgcgtggatgctttctggcgccatctttgccggcatcgttgcaggggcaatcgcgctcttgttcacgctgatgggtggcccgcacatgggcttgctggctatcggcggccgctcgggaagatatggcggccggtcggggcccgggggattcggcggcggtggcggcggctttggcggtggtggtgcttccggcaagtggtgatggcaaacatcaatcacatcttgcggcgtccgccgagggggcgaaaatggcgatatttggatgtgaaatggctgggcagctatgtaacccttgggccctataattatttcgatatctgccgacatcgaggctgccatgcaggtgttgccatacgtgtggccacggacaggcctcggtgcatccggccgtggactgaggattcaagcacctggtgcggaatctgccgaattaccacgcgcgtgagcaaaggccatgtggatcggcgtgcctaaagaagtcaaggacaacgagtaccgggttggcctggcgcctgcctgcgtgcgcgaacttgtcagccgcggtcaccaggtcatggtccaggccggggccggggccgcgcttggcctttccgacgcgcaatacgaagcggctggcgcgaagctggctgccgatgcgaaggccgtgtacgaccgggcccagatgattgtcaaggtcaaggagccacaaccacgcgaactggcgctgctcaggcccgggcagatcctctatgcatacctgcacctggccgcggaccgtgagctgactgccgcgctgctgcaatccggcgcggtctgcatcgcctatgagacggttacggggcctgacggtggtctgccgctgctggcccccatgagcgaggtcgccggccgcatgtcagtccaggtggcggcagcctacctcgagaagccgaacggcggcatgggactgctgctcggcggcgtcccgggcgtcgcgccggcacatgtcgtggtgatcggcgccggcgtggtgggcgccaatgctgtccagatcgcggttggcatgggggcgcgcgtgacggtattggacaagaatatcgaacgactgcggcatctcggctccgtgtacggcaatcgagtcgtgacggtctactccagcgctgacagtatcgagcgcgcgttgctctcggccgatgcggtcatcggcgcggtgctggtgcctggcgccgaggcgcccaggctggtcacgcgtgcgatggtcgcgcgcatgaaagcgggttcggtgctggtggatgtggcgatagaccagggaggctgcgccgagacatcgcgcccgaccagccatacggatccgacctatgtggtggacggcgtgctgcactactgcgtgaccaacatgccggcagcggtggcgaggacctccacctttgccctgaacaactccacgatcggtcatgcgatggcccttgccgacaagggatggtcccgcgcgctctcagacgacccctacctgcgggccgggctgaatatctgtcgcgggagtgtgacttatgcggccgtcgcaagcgcccatggctacgcccatgtacccgccgagcaggtgctgacctgagcgcggccgccagtatcggccgacacgttgctgtcggccacccctggtgcagcagccctgccatgagccgaatcacagcggtgtggctggcttggttgactggcatcaacccgcatgtccttgcgaccgctaatttgggatgaaccacagccaaagccgaggtcgccatgtaccgccgcattctcctagccctcgatggcagccgttcatccttgaatgccctggagcaggccgtgtcgatggcgctgaccaccgacgccgaggtcagcgccatgttcgtcgtcgacgacagcgacctgttcttcgaggtcagcccgggtgaccggcactggctgatggccgacatcattgcctatggcaagcaggtgctggctcgtgccggcgagcgcttcagcgccgccggcgtgcgctggagcagcaggttggccgagacgcccggcacccctgcgaagattgccgaggcgatcatcgcggaagcggaccactggagcgcggacctgatcgtcatgggcacacacggccatcgcggcgtgcggcgcatggtgctgggctcggtctcggagcacgtggtcagcaagacggttcgccccgtgctgctcgttcggcagcagtcgcgcggcgatacgccctgaccgttcggttccggcctgcgaaaaccccaataattcttccggagtgacgcaaatgcaggtttcaagaagcctaggcctcggcctatcgtcgctggcgattgccgttgcggcggcgggttgcgccactcgcgccgcgcccgctggcgtgcagatcatggagcagcacggcgtttcctacgtatcgggtggagacgatgaggcgggcatgcaaagcatgctggccatcgccgcgcgtttcaatgtacggctgacgatggtggatgccgggcgcgggaagccgctgggcggtgccacggtggtcgtggccagccaggagggccgccccgtgctgcacactacggctagcgggccgctgttctatatgcgactcaggccgggtgcctatcggctcgctgtcggctaccaggggcgggaccagatgcgcgacatcgtcgtcgctggcgagccgctcgaggtgacgttccggctgccggtcaatacgctcgaggacgactggctgctctgcgccacgacaccctgtccgcgtcgctgagcctgccgctcggacgtgtcgccgcgggcacgacaccgcgcaagcaagttcgcggcggttcagggacgatcccgcgaaagagaagcgacggaactggaaggggaagaagaagcgctcaggcttcgttcggggacaagcaggcgagccgctcggcgtgggcaggcctgaatccgcgagccgcaacccctgcgcgaagactgccgatgcgcgcgcgaccagcggcggttggagcgcggtaccgcggctttgacacgtatcaacagcagttgcgccggttgccctacgctgcatttaaccagtccagacccgagtcgccacaggctcccatcgccggagaaaccgctatgtaccagcgcatccttgtcgccatggacggcggcgccgcatcggaacttgccctggaacaggccatgatcatcgcgcgcgccgccaacgccgaagtggaggtggtccatgtggtcgatgaccgcagcccgtttctggatgccagcaatctggatccggtgagattgatagaggacctcacgacggcggggcaaagcgttctcgctgccgcctccggccggcttgccgcagcgggtattcgccacgtaacgcggctgctcggtaagcctatggtcgagggcgacgttgctgccacgatcgctgccgaagccaatggctggggcgctgatctggttgtgatgggtacgcacggccgccggggagtgcggcgactcgtcatgggcagcgtcgcgcgaagcgtgatcaacctggccgtcgcgcccgtcctgcttctccgcgccgaggaagcgtaagcaggcgaacagattttggagggcattacgccagagagctatgcatacgatcgacttttccggcgagacgccggattactgcccgaccgggccaagcctgcggtgtgccgtgaaggtggatggcacaccggcgacctatgagatcactgccgaggcgcttgaggatcatttcggcgcacgctcgtaccgcagtgaagatttgctgccggcattcatgagcaaccgccaggacattgaacgcgtcgcgggagcgctgttcgagatgacaggtgcgcggcacatcgtgctgcacagcggccattttcgcttcgcggtgtgaggcgcacgtcctggccggcggcagccgccaccgggcggtgcgcgtccttacaaggagctacccatgaagaatcgcttgcagtcatgcacaccggagaaacggccaggatggcgcaggcttgccgcctgcgcgttggtgccgctatgcacagcgtgtaccgccgtaccggacctgctgcggccgccgaagccacgcaccgccgcgctggcggcaggcagcctgggccaactcgtacctggtgccagcggtattgcctgtagcgcggacacgaagacggcttgatgcacgacaaatccggggcggggtggcgatatagattcaagaaaagctccgtccggggctgcctgatggagtcaatccatggactacgcaacgatcctggttcatctcgatgccggccgccgcgtgtacgaccggctgcacctcgcgacccggctggcgctggagtttcattccacgctggttggcctgctagccgtcggcaagccggatcccaccgccgtgcgctacctggtggacggtgaccgcaatcttgcctcttacaccgaatggcggcatcaggtcggcgagcgggcccgtcacgccctgatgggcgcaacggacgaggtaaccgtcattacggaatggcgggcgccggactgggccacggcggcaacggtccaggcagaggcgcatcgggcggatcttgtcatcctcggacagcacgatcccactgatgaagccgcctacgccgagcccggctttgttgaatccattgtgctgggatgcgggcggccggtgctggtggttccgtatgcgggccggttcccgagcgttggcaagaacatcatggtggcgtggaacggcagccgcgagtcggcgcgggccatccgcgatgcgcttccgctcctgcagcgcgcgggcactgtggaggtggtctcgtggacaccgtctggggttctgaaggggacatgggtttcgccgcctcagcatgccgtggactggctgggtcggcatggcgtggcggtgcagctttgcacgtttggagcggaagacggcgaagacgtcggccagatgttactctcacacgccgcggaccgaaatgctgacctgatcgtcatgggggcctacgggcacagccgggtgcacgagctggtccttggcggtgtcacccgcacgttgcttgagtcgatgacagtgccggtcctgatgtcgcactgatattgccgcagcgcctcggcgatgcgatgaagtgaggtgcggtgcggttcggctgctgccagggagcgggatgtgggacaaaaccgaacactccaccagcttgcgcggggtttctggaatgagttccttaggcgtcggccggcatttcccgtgtccgacggcatgtttccgttcgatccggctacccgaaagtttgcccgctcgcaaggttgccaggcgcagcacagtgaacaagaggctagggttccagcacgtaggtaccaggagcgtccgcgagcccctggcccggcgcctgtcgcgtgcagcgcgctgtcgagtgggccactagccagtcatgccacgccggccaccaggaaccgtcgcggtacacagctacgttgaggaattgctccgggctcaggtagggcgcggcgggcaatcgcgtatgcacatggtagcgccggcccgggtggcccggctcggacacgatgcctgcgttgtggccgcccgaggtcagcaagaaggtcagttcagccttggtcagtaagtgcagcttgtacacggagcgccagggcgagacgtggtcgtgttcggtgccaaccacgaaaagcgggaggtcgaggtccgacagggcgacgggctgtccgcccacgcacagcttgccggtggccagctcattgcccaggaacagcttgtgcaggcattccgaatgcaggcggtaaggcaagcgggtggtgtcgcggttccaggagaccagatcgttggcgcgcaaacgttggccgagcaaatactcgctcattacgcgcgaccagatcaggtcctgggcgttcagcatctgaaaggcagacttcatctgaggcccgtccagatatccctgactccacatgagggcgtcgagcgtggcgagcgagctcttgtcgatgaacaggcccagttcgcccggatcatggaaatcggtctctgaggcaaagagcgtcatgctggccagtggcccgccggcggcgtcgcgggcgagcatggcggcacccgtggcaagcagggtgccgcccaggcaatacccggcggcgtggacgtgcgcgccgtcgcagcgcgcgtgcacggtgttgagcgcggtcagaagcccggcctccagataggtgtcaagcccgaagtcgcgggccgaggcgtccgggttcttccatgaaatcatgaacacggtatggccgctctcgaccaggtagcgcaccagcgaatcctcgggcttcaggtcgaggatgtagtaccgcatgatccaggacggcacgatcagcaccggctcgcgccagactgtattggcgccaagggcgggcgcatactcgatcagttcaattagtgcgttgcggaacaccaccttgccaggcgtgcgcgccacgtcgcgcccgggtagaaattccagcgcggggcgccccgcaggcagcccaggcacctttgacaacagctcactggcgtcctgcagccagtgatgggcgccttgcaggaagttggcgccgaaggtgctcgaggcggtcctggcaatggtcggattcatccaccaaacattgccgggcgcgagcaggtcaagccattgccgggcgcagaaggcgacgatgtgctggtgatgacgcgacaggccgtcaatatcctgcgtcagcgactcccagaaggcttcgttgcgcatgaacgcatcgcgccagcagcgataaggccagtcctgccagccggcatcggcaaagcgctgatcgctgaggtcaacggacggcggctcggccgcggtcggcaacagccgtggccagtcctcgatgctgtgctgcagccacacctgccatgcctgcacaatctttgccggggagatgccgagctgcagcgcccagtcgagtccggccagacttgccgagatcaccgacaggcccccggtggcacgggccaggccggcgcggatctgcttgtccatccagacttgcgccggtatggcggcctgcggcgcgcattccggcatggccgacaggctgggcggtgacgtcctgtcgtcgatcctcattgcaggtgttgcccgccgttgatggcaaaattcgcgccagtgacgaaggccccgtcgtcgctgcacaggtaagagatcagcgccgcgacctcggccggcttgcctagccggccgaccgggatagtcggcaacacgtcccgctcgaggatctcggcgggcatgtccgtcaccatgtgcgtatccaggtagcccggcgaaacggtgttgacggtgatgcctttgcgtgcgagttccagcgccagcgccttggtgaagccatgtacccccgccttggcggcggcatagttggtctggccaaaggcgccccgcgaggcattgaccgaagaaatattgacgatccggccccaaccgcgcgccaacatcggctcaaccagcggccgcgtcatatgaaagagcgagtcgaggtccgtgcgcagcacgaagtcccagtcagccttatccatcttgcgcagggtccggtcgcgcgtgaccccggcattgttgatcagaatatcgacgtcgccgagctcgctgcgcacttgcgacacgcagcgctggcaggacgcgaagtccgtcacgtcgaccgggaacgccgtgaattcgcggccggcggagcgttgcgtgccgagccactgggccacgtggtcattgtgtacggagtgcgtcaccacgacgcgcgcgccgtcggccagcagccgcacggcaatcgcttcgccgaggccgcccatgcctcccgttaccagggcaatgcgttgtccggccatctcgtcagctccgtgacgcgccggcggggcgcgccggggccttcgcgcctggggtagggacggccatcaggcggccgacgttgtcgaacatttcgcgcgccgattccgcaaagggcgcgtagccgcctccctccaccatgaccctttgctggtagtcctgccaggcttcggtcgactcgcgcaggtgctccatgaaggccgaggccatttctatgtaaagaccgccaatgtcgcgtgcatgtgcggcgttgcgctcgacctgcgcggccagaatctgagcgggcaggccatggaaggcgttccagtctggcgcatcgttgacgcgggcgagcgcctgccgggtgccttttatgtcctcgtccagggccttgaggcggagcctgagcaacatctggcgcgattcttcccagcgcagccaaatgcgcagggcggactgctcggcgcagcgcgcgagttcgaaggcgggatcggtctggtctggcatggaggaactcctatagtcaagcggctggcctgccccggggcgcgcaggtctggataagtctaggagggcaaccttggcggggcttgacgtatcgcaaggagtgcgcaatgcgtcgggcggcgcgcggcatcgccaagccgcgccgggttcgtcagagcgcaggggtcgcatggccggcggcctgcgcattgtggccggacacccggagaggcaaggccgatcaggagccgggaccgagctgtcctgctacatgccgcgagcaaacgggctttcctttgatccatcccaaatggcagggccggcttgccgcctacgttaatcccaggggggcgttgccgaccccatcgatccggagcacgacgtgacacatcccatcgttttatccgaagccggcgcggaatacctgaagctgccgccaccgcagaccgaaggcggcatgccgctgctgacggcgctgctgcagcgccgctcgacccgacactttgctgcgcggaacctggatgacacactgctgtcgtccctgctgtgggcggctttcggcgtcaaccgcccgggcaccggcctgcgcactgcgccctcgacccgcaactggcaggaaatcgacctgtacgcggcgctgcgcgacggactgtacgtgcttgaaccggcggactggcgccttcggctggtcgtcggcgcagacctgcgcgcggcgaccggcctgcaggactatgttgccgaggcgccattgaatctcgtctatgtcagccggctctccaggctcgatgagaccgacaagccgctgcgccagttctataccgcgctggatacggggcatatcagccagaacgtttacctcttctgcgccgcgtccgggctggccacggtggcgcgcgggctgctggaccgccgcgcgctggccactgccatgcggctggcgcccgaccagcgcgtgatcctggcccagagcgtgggctatccggcgtaagccgccacccaggcagccaaaggaggggggtaatgccattcattgacagggccgatgccgccgcacaactggcgcgtgcgcttgctggccacgcaggaaaacggccgctggtgctggccgtgccccgcggtgcggtgccgatgggcgccatcattgccgatgcgctcggcgcggaccttgacgtcgtgctcgtgcgcaaactcggcgcaccgggcaacccggagttcgccatcggcgccgtagacgagagcgggtggacctatcttacgccctatgccgccgcggcaggcgccgacagcgaatacatcgaccgcgagcgcgcggcccagcttgaggtgctgcggcgccgccgcgccgcctacacgccgggccgggaaccggtccgcgccaccggtcgacaggtcatcatcgtggacgacggcctggcgaccggggcctcgatgatcgccgcgctgcacgccatccgcgagcagaagcccgcgcggctcgtctgcgcggtgccggtggcgccgccgcggacgctggagctgttgcagccctatgtcgacgaggtggtatgcctggagacgccggccggcttccgggcagtgggggagttctaccgcgacttctcgcaggtcgaggatgcggaggtcgtggcttgcctgaaagggcggtaaagacacgcacaagcggggggcacccatgaagggcgacaggcagctgcagcaggacgtgaccgaggcgctgatctgggatcctgcggtccatggcaacgagatcggggtccaggtccaggacggcgtcgtcacgctgaccgggcaccttggaacctttgccgagaagtactcggcggaagcggccgtcaggcgcattcccggcgtgcgggcgctggccgtggaactggacgttcacctgcccgacgatgcgcgccgcaccgatgccgacattgcccgggccgctgccaacgtgctgtcctgggatgcgacggtgccggccgaccgtatccggatcctggtcgaacacggcgtggtgaccctgagcggcgatgtcgactggtactaccagcgcaccgccgccgagcacgccgtggccggactgttcggcgtggtcggggtcaccaatgcgctcgccatccggcctcgtgccgacaagcaggacgtggcggcacggatccaggcggccatcgcacgccaggctgccagcgacgccgaccaggtaaccgtgacggtgagggatggcgcggtgacgctgaccggcactctgcgcacgctggccgagcgcgaggcggcattcgaagcggcctggtctgcaccgggcgtcagcgcggtcgtcaaccagatcgaagtcaggcccggctagctcaggcctgcaccgttgctcagtattcttcgccgaacatcgacgaccccgtgcgcatgccggcatcgccctggccggcggggctgcgctgaatcgcgatcatgcagtccgtcgtcagcagcagggaggcgatcgacacggcattttgcagggccgtgcgtaccaccttgacggggtcgatcacgccgagttccagcatgtcgccatagcgctcggtgccggcgtcgtagccgagcgtgcccgagccgacgcatacctggtgcaccactgcgtcggcatccgcaccggcgttggcggcgatctgccgcatcggcgcggccagtgccgcgtggacgatgtggccgccggcggcctgctcggcgttcggtgcctgccaggcttcgagggcagcgcgggcgcgcagcagcgcaacgccgccgccggcgacgatgccttcgtccaccgcggcgcgggtggcgtgcaaagcatcctggaagcggttcttgcgctcgtgcagcgcgctctcggtggccgcacccaccttgatcacagccacgccgccggccagccgggccaggcgccgctgcagcgcctcacgctcatagtccgagcgcacctcgtccaggcgcaggcgcagggcggcaatgcgctcggccacgcgcgggcgttcgtcaccggagccgatcagggtggtggtgtccttgttgacctccacgcggcgggcttcgccaagctgttccagcgtgacgtgctcgagcgagatgccggcctgcggtgagaccaccgtggcgccggtcagcgcggccaggtcgcccagctgctcggtgcgcgagtcgccgaaacccggtgacttgactgcgcagctcttcagcgcgccgcgcaggttgttcaccacgagcgtggccagggcctcgccctccacatcgttggcgatgaccagcaagggccggccagcgtggctcacggcctcaaggaccggcagcagttgcgcgatggcggcaatgttcgcgtcgcacagcagcaccagcggcgaatccagcacgacggcacggctctcgttggtcgcgaacaagggcgagaggtagccgcgatcgatcagcgcgccgtcggcgatgtcgagtgcgtcgtccagcttggagccatcctccacgctgattgcgccatccttgccgacccgctcgacagcctgcgccaccagcgtgccgacggtctggtcgccgctggccgagatggtggcgatctggcgcatctcgccggtactgctgcagggccgggcgctttccagcaaggcgctggcgaccagcttgccggcggcctcgatgccgcgcttgagttgcatggggtcgtggccggcttcgacgtatttcacgccctcagccacgatcgcgtgggccagcgtggtcgcagtggtggtgccatcgccagcgatctcgctggtgcgcaccgcggcctcgcagagcaggcgggcgcccatgtcggcgaacggattggccagcgtcaccgacttcgccacgaccacgccggaattggcgaccagcggcaccatgtcgggccgctccacgatcacgttgcggcctcccgggcccagcgtgaccttgaccgcgtgggccagttgttccacgccgctcagcatcatgcggcgcgcgccttggtggaagataagtgttctggcaggcatgaaaaactccgcattgacaatcagtgggtcgggcttgctactacggtagttgccgtgcaggtccgcacgttgatgcaacgcaagcccggggtggcgcccgccgcctgtgacaggcgcgcttcattccggccggtcgctgtccagtacgggcacgggatgcccgggctccagcggctccagcgccttggtctcatccaggtggaagaggggcattgcgcgacctgctacggcgggtcatgtaggcggtgtcgcctgcaggtgtctggtcattgtttgatccagcccaagtcgatggccgcgcaggcgcatagctttaacagtgtgaacgcgccccgtcgtcagcacgactaaggaaatgcaactggcgcgggacatcggcaaccccatccaacatgcctgcggggagcgctgacgatggacctcggcatcgccgagaccgaactgaacgtgcactggcacaggacgcgatggtggcgcggccgttggcaaggacaggaagaggggggaagggaagtctcatggagcacatcaccatcgaacaggtgcggatccatatcggcgacatcgcgctgccaggcgaccttaccctgccggaagcggcatccggcctggtcctgttcgcacatggcagcggcagttcgcgctacagcgtgcgcagccgcggggtcgcagcgacgctgaatcgggtgggcctgggcacgctactgtttgacctgttggcgccggacgaggacgccgggaggtcgaagcgattcgacatcgccctgctcggggaacgcctcaaagctgccacggtcacggtcgcgcacctgacgcgcgatcgccacctgcggctcggctacttcgccgccagtatgggggctgccgcggccatccgtgccgccgctgagccgccgccgcgcatgcggatcgacgcggtggtggcgcgcggaggccgcgtggacctggcaggccacgaggcgctgcgccaactgcagtccccgacgctgatgatcgtaggcgaagcggatccggtggtgctgaagctcaacgcgcgcgccaccgcatggatgcaatgcgagaagcggctggaggtgattcccggcgctactcacctgttcgagcagccgggtgcgctggaacaggtcggcgagctcgccggaaaatggttctgccagcattttgcagcggctggcgggaacttgtagttcgacaggatttccatggtgccgtgcgatgcacggcgatgactcagtgaaaaggagaatgaaatgaacgatactcgcgccgcgctcttgccgcacaaggaagcactagcccgtgatgccaacacgctgttggcggatgtacaggcattgttgcgggatgttgccgacgaagccggcgtggagaccgcgcaggcacgcgcgcagctgagcgcacgcctgcacgcgctccagggccgcctcgccgagcaacgccaggcggcgcgcatgcgtgtctcgcaatgggccgacaccacggatcgctacgtccacgcacatccctgggagagcatgggctccgtcgccgctgtcgcggccgtggctggcgccctggtcgcgctggccgtcacccgccgttagcgcgggcacggcaggcaggctgctgcagccagtggccggttgcgaagccatggtcgtgtgcacgctggaccgtccggatgccaggctggtgccgctgctgtggcccgctgccgcagccagggaaggtggcgccgtgcgggtcggactggtggcgccatacctcgcgtacatgcgccaggacaagctcttcccgacaggctgcaagcggtcgcggccgacattgtcacgtgcgacaccgttgcgcacccatccaaccgcattcccgtagcagagcgcctggcagccggcatccggctggcactccaggcgccagcgggttcaggagatccgtcatgaacaagctcacagcgcaggaaaccgtctcgctggcggcgcagcttgacgcggacgaagcgcgcatccatgccgccgttggttccgccgacacgccgatgacaccattggcgcagcgtgaggcgcgggacgagggcgaccttgccgacgaagaaatcctgcagcggcaggatgatgcgatgctggaacactaccgcatgcaactggccgacatcgccgccgcgcgggcgcggatgcagcacggccagtacggcacctgcatcgattgccagcagccgatcccgttctcgcgcctgcaggcatatccgaccgcgaagcgctgtaccgcatgccagcgccggcacgagcagctttatgcgtgacagtcggaggatgccgccgagggcaactgagcgcctggcgggctgccaccgcgaaagcgacggtcgccccccggcagcggccgggaggctggcgctgaccggctagcgcaggtcgtactcgcgcatcatttcggtcgtgactgccttgaccgtggccaggcatgccggcgggacagcggggaaggcgtcgatggtccagttgcagccgccgttggcagttgcgtcgacacgctgcggcaacgggatgtcgcagtcgcggcaggtgtcgccgaggtcggcgttttcctgcagacgccgcagaatttcattgcggatctgttccgcactgccgaggttcttgatcatgtcggtgtctcctgttgtcaggtggtggcgatccggccaggatgcctagaccggcgcgctgtcatgcggagccggacgcccgatggtctgggacaggatcggttcctcgtcctcgttcagcgacatatgctcggccagctggcgccggttaagccagccgcgcaccaccgcgcccagcccggccgaggcgcagtagagataggcgttctggaccatggcgccggccgcggcggcagcgaaggtctcgtgcagcttgggcgggacgtcctgcatccggccatggttggcgacgtagaccaggtccagcggcgccatgccgacgaagtcctggtagccggtcatgctgcgcacgtctgccgcgcgcttcagcaccaggcaatggtggatcgggtcgtagcggtagaggccggcgggcagcgccgcgtagacgtcgatcaccgcctcgccgtgcggcgaaggggctgtgcggccgccgccctgggagcggttgacgcccgccgcggcccacagcagctcgctcagctgctgcagtggcagcggctgctcgtcgaactcgcgggtgctcatgcgctgccacagcgcccccatcagcggcaggccattggtgcggtccggctgtggcagggcgatgacccgctcgctcgtgccggaggcggggcgtggcagcaggtccttgatgggctggtaggggatgcgcttcagttcgtccatgggagctcgcatttgttgcaaagagcggcgcgagcgctctgcgcatggcaccggtatggacgaatgtaggcgctgcccccggccgtggattgcgctccgtcaagcagcgtcgatggggccttccctggtgtgaaagcaaggggtgctggcgctgctttagatggcggcgccgagctctggcgtcagccgcagccgggtgcggcggggcccgtaacgctgcccggcgaggcgacgcaggcacgctcggcttcggtcagcggctcctggacacgcatctgccacgccagcacgccgtcgtcggcatccgacaggtccccgcccgcccgggcacgcgcggcgatgcgggcgcgcagcgtctcagggctggcttcgcaggtgacgatggcgaagggcacgccaaggcggcgcgcctgggcagcaaagcgttcgcgctcggcgcggaccaggaaagtcgcgtcggcaagcatcgggaacccggcgcggcagccgagccggcagaccgcgagcaggcgtcggtaggtccgtgccgtttcgctcgcggcataccagccacccgcgggcatcacgccgcggtgcaggcccttgcgtaccgcgtcggagcgtacgcgtaccatcgacccggcctcgctcatctgtgccgcaaccgtggacttgccgctgccggacaggccatgcatcagcaccatcggcccgcgacggcggctgaggcatcgccatgccagcgcaagcagcctgcctgcctcggcctgcgccggcgccatggacgcgcccgcggcgtgcttctggcagccgcgctccagcagcacgcgcgcgcgcaccagggcccgcatggcgagatagaagggcaacacggccagcgcgccgtagtctcccgactgctccaggtagccgttgagcagccggtaggccagcgccggtcggccatggtgcagcaggtctatgaccgggaaggccaggtcgctgatggtgtcggtccagcgcagggcggcgtcgaactccaggcagtcgaatggggtcggcacgccgttcagcagcacgatgttgcccaaatgcaggtcgccatggcactcgcgtacatggccgttgcgcaggcgtgcccggaacgcatccgtcagccgggtggcctcgctgcgcgcccgcagggccacgcggctggccaggtgcgtggccgacgtcagccggccaatgccgcccaggcactccgcaagcgtcgcgtcgatgcgggccggcgtgccaaagctatcggaaggggcggcagggggctgcgcctggtgaaaggatgcaatgctgcgcgccagcgcatcgatatggcccggctccagccggtccgcaacgattcttgcgctgagcaggtcttgctggtcgaagcgccgcatccggaccgcatgctcgatcggtatgccgccgccaccgatgcgcaccgagccgggcgtggggcccgccaggatcggcaccacatccagatacagggcaggtgcgaaccggcggttcaggcgtagttcggtctcacagtcgtcgcggcgtgcctgcgcggtggagaagtcgacaaagtcgaaccgcaccggcttgcgcaccttgtaagcaaagtccccggccaggaagacacgggagatatgcgtctcgatgacctgtactgccggcgccgggtgggggtaggcgtccggctgctgcaaggcggccatcaacgccgcgtcgtcccattgactttccatgtcccttgccgcctgcgcccttgcgctgttgtgaactgccacctcaactgcagcctcggcacgcagactccggctgccaactcgcccccgcggtgccctatgccgtcacgtcggccagatcctgccccaggatgcccgccgcgctacagagtacgcccacgatagccagcagtgcgcgccacgggtggctcagcagcgcctccacttgctcgctgcggctctcgccagacaggcaccagatgcagaagtgctcgcagttgttggtaagaaggcggtaatcgtcctctccaagccgcgcagtcgcgcgccgtacgatctccgcctcgacgtacctcgcttgcgtggccggctcgacgcgaaagccgtagccgccggcaaagccggcgagggtggtcttttcgacggggccgcaacgcaggaaacctttgaacccgacatagtgcaccacctcgccgttgccgacataaatgccgtggtggacataaccacggcggtccgtcttcagatgcgcgccaagaggaatgtccgcggagattgccgcaaggcgctgtgcgtgtccgatgtggtgatcgtcgctcatcgcttttccccttgttgcctttgttgtgctggtcgctcctgccccggtggtcccggttttcctgccgatgagggcaaccgtgtgccccgtgtatgcctgcagtatcgttgccggccggcgacgccgaaatcagccggttccgaaaaacgtgtcggcttgctgccatgcagcttgtacgcgcatcgcgacggcgcttgtccgccgttcgcaccgggctgtcagcggaacctgacaagggcgcggcggtataacccgatatttcccagccattgtggagaggagggacattcaccctgcgttggccggtgacttcggcgatcgttgacaggcatcaacccgtatgtccggccggacgctaccttccggtaaccgaagatcaccgccactacgggcatttcaatgcgttgtcggagggacgaaactggagattacgtggagctttgtacgcatgctctcgtccctgatgattgccgtagctgctgcgggttgtgcgttccgctatgggcaagccggatcatacttgcagccaatggccgaatatggcgtctcgtatgtgtcgggcggggacagcgaagccggcatggacgcgatgctcgccatcgcggaccgcttcaacgtacgtctgaccatggtggacgccgcacgcggggacccgctgccggatgctgccatcctcgtgtccagtcaggacgggcgctcgatattgcatgcgagcgcaaccgggccgatgttctatctccggcttcccacgggcgtctattggctggcaattggttatcagggctgggtccggacccgcgatatcgccgtcgacggccaggcactcgacatgacgtttcgcctgcccgtgaggacgctggaggacgactggctgctttgcagctcgccgcgcggcaacgtcgcggttaccgccgtctggtgacgccatctcagcttcgccatcaattaccaccgtcggcgcagaacgtcactccgtgggcgcatcttcgcgcagcgcatggaacagctcgtcctcctgcgcgcagtgcagccgcaatacggcctcgagcccgtagagcagccgctggtactccctgaccctgccggcgtctggcccatccggcggtgagtcgtccgccatccgctgcagtagccggatcacccggaagatctcgcggtgcatcgcgctcatcgccgccagcggatcctcgcctccgaccagcagcgcgagttgcggatagagctgcgcgtcatcgtgctgttcgtggggcaaaagtgttccgctgagggatgcgcacaagcggcgcagttccgtgcccgcggcgtggccaggcatggctggcaacctgtccgcgaggctgcggatctgttccatcagcggcgccagcgcggcgtgctcctggttcaggcgctcggcgtcggccgtggacaggcgttccgccggcaccgacgggtcggcgcgcagggcgcgcagcgcattggcaatgaccagcacatcgatgacctcctgcagcatggcgccggccagtggcggcaggtagccgaacgcggcgaccgccatcgcgacgaacgacaggcccatgccggccatggcgctttgcacggccagccggcgcgaccggcgggcgatgcgcaccgcgtccaccagccggtcaagccggtccaccagcagcacgacatccgcggcttccgacgatgccgcggcacctcgtgcgcccatggccacgccgacgtccgcggcggccagcgccggtgcatcgttcacgccgtcgcccaccatcagcacagtgccgtcgtggcgcgccgcctcgatcgcggcaagcttctgcgagggggtgaggttggcatggacctcggtcacgcccagcatcgcgccgacggtctcggcgacgtcgagccggtctcccgtgagcatggccaggcgccgtatgcccgccttgcgcagcaagcgcaacgcgcgcggggtgtccatgcgaatcaggtccacgaactgcagtgccccaaccagcacgccgtcgacggtgaccagcgagaccgaggcgccttcgaaggccgcgcgctgcaacatggcctggcaccacggtggcccggcatcgccgccgccggcaaaggcgggcgatcccaccgccaccacgtgctcgccaacccgcccggcaatgccagcaccggcggtctcggtcacgcctgacggcaggtccagggccaggcctcgctcgcgcgccgcggtcgtgatggcttcggcgacaacatgcccggaggcctgggacagcgaagcggcgacgcgcagcacgtcgggcgccggccatccgggcgcgctctcgatggccgccaggcgggcccttccgcccgtcagcgtcccggtcttgtcgaagaagaggatgctcgcctgcgacaacctttcaagcgcgccgccgcccttgaccagcacgccgcgcccggcgcaacgcgacaccccggacacaatcgccaccggaacggccaggatcaacggacaaggggtggcgaccaccagcaccgccagcgcccgcgcgagttcaccactggcaagccaggcaagcccggcgacgagcagggtgacaggcaccagccacagtgcataacggtcggccaaccgcgccgcgggcgggcgctccgcgcgggcggtgcgcaccagcctggcgatgccggcgaaggtgctgtctgccgcggtggtcgctgccaccatctcgaacggggtgccggcgttcagcacactgctgcgcacggtctcgccagggagtcgctgccgtggcagcgactcgccagtcagggcagattcgtccagcgtcgcctggcccagcaatgcgccgtccacgggtacgacttcgccatgccggaccaacaggcgatcccccggactgaccacatcgagggaaaccgcgcgccattctccgtcctcgaagcggttggcggactgcggggcgcggctgagcagggcggacatctcccgctcggaacgggcctgcgcatagttctcaatggccctgccgctctcgatcatcagggccagtacggcagccgcgaggaattcgccaagcgccagcgccagcccgatcgccagcagcgccaggacatcgacgcccgcttccttccggcgcagcgaccgcacgatggcgacgatcagcgcgccggcgacgaccagcgcgccaaccgcccaagcgagcctcgcggcgagcgcttcgccgaaggcaaaaagcagcaagccagcgcccagcgtgccggccgcgactggcagcaagccgaggtcaaacttgcgaaacccgatgtgcatggcgaacccgatcccctgcgtaactggcgccggttgctgggatactcccgctgatgccttcaggcgatcgcagatcctgccgcgctggcggctgcgcaatcccggctgcacgccgaatcaggcactgtgtaatggtgatgttagtccaacaggcaccgggccgataatagcctcggccgcaggcagggcgcgccagccagccctggagatagtcgatggctgcaggggccgcggttcgcggcgccacggagatgattcggcacggcgcggacccgcagtggctgtcggcggtactgccgtattcgctcactccttgatgcacgcggcgattacggcgcattttcggttcaaattgcgctttggccggtgccgccctatatatttggggggcgagaagcactctcagacaatcatcgtccattccatgagcaaccctttggcgcccgcgggcaaggtgcagccttcgtccgaacgttctcactcccttgccatggcgattggcagtgtgacggtcgttctcgtcctcgcggggggatgcttcttgatggctaccgtcgaatggtatcggcagttcctggcgccgttggtgctcttgacgggcgcaggcatcgggctcgccgtgggactttactggaaccggttgaggaagcttacagggagtagtgatatccaacgcgtggcggatagcgaagcccagttggcggggatcatccgatcttcgatggaagcgatcatcaccgtggacggtgaccagcgcgtcgtactgttcaatcccatggcagaaacgctattcgcctggccggccgaacttgcaatcgggcgctccctgagcgacttcattccccaccgctttcgggccgcccatgcagagcatgtgcgccggtttgggatcacgggcgtttcggaccgcgagatgggactccaacgggcgctgtgcgccatgcgtcgggacggaagcgagttccctatcgaagcatccatttcacagatctctgtcggcgaggccaagttatacactgtgatgctgcgcgatatcaccgaacgcgtgcgtgctgaggaagccctgcaccgaagccttcagcttgtgaaggaaagcgaggcgcgattggcgggaattatccgctcctccatggaagcgatcatcaccgtggacaatgaacaacgcgtagtgctgttcaacccaatggcggagacgttgttcgcctggcccgccgaactcgcgattggccgccccctcggcgacttcattcccgaacgctaccgggccgctcatgaggagcacgtgcgtcggtttgggatcacgggcgtatcggatcgtcagatgggacgtcaacgggcactctacgctctgcgtcgtgacggcactgaattccctatcgaagcatccatctcgcaaacggcccacgaaggcacgaagctatataccgtgatgctgcgtgatatcacggagcgggcacgcgcggaggcggccctgcgccgctcacgggaagaactgcaacagctttcagatgggatactcgctgcccgcgaggaggagaggcgccgcattgcacgcgagctgcacgatgacctgggccagcgcctgagcgcgcttaagatggacatggctatgctcggcgcggacgtcgatgagggccgtgacacagcaggactgctagacgagattggtgccataaacggcgtcatcgacaatactgttgcctcggtccgacgcattgccagtgacctacggccggccttgctggacgagttgggaatgattcctgccattgagtggttggccgatgattttgccaaccggtacggattggcggtgagcgtggacggtgccgaggctgacgtccccgcgcagacggcaatcgccatgttccgcattgtccaggaggcattgagcaatgtcgtccggcatgccgacgcgaccaccgtgcatattcagctcacccagtcagagggccaacttgtgttgcgggtgcaagacaatggggtgggctgggacaaggtctcctccgcaagcgggccacgcaaatcgctgggactccttggcatccgggagcgggcacgccttctgggtggcagcttcaccatcgacagcactcccggcaagggcttttgcctaatcgtgcaaattccccacgaaagggtggcctgatgcgacatgcctcatgattggggatggcatcgcagttgtccggaatcaagcccccatgtgccggggtaattctggcgattgtaattgcgaacgccgcgaccggcttcattcaggacggcaaggcggaaaaaagccacggaccgtttcggcaccggcgacgctacgccgaatgctttgcagacactcactccattctgctgctgcagcggaactgccgtcgcaagagcgacggccggacggcaaggggctggcaggtttgcggtctgacgggattagtccgcacgagggccaaaccttacggctagacccatcatccgcctggcgccatctttccacccatgcccggacccatccccggccccatgcccggacccatgcccggacccatgcccatgcccgggcccatgccttggtcgttggccatcgtctgcatcatttcctgcatgaacgccatgtgactacccgccatgtcttggcacatctgcatttgatttgatggggcgtttcccttggcgactctcttgccaggagccatacgagcagggccgcccattttcatcatgtccttttgcatgatggccattgcatcttgcatgacctgatggcgttcagccaagagggcctgacgctcctccggcgttttggcacgcgaaagccgctctctgatggcacgcaggtgggcaacctgggcgtccagctttgcatcgctggaaactccgggagttacgaccggagccttatcttgccgcttttcaggatggtgctgctcatgctcaatgccggtagccggcgacgccgggaaagctgctggcgcccacgctagcacggcggccgcagtgataagggtagagaggcgatggttggtggacatgggagatcctcctatgaaaacatgatggttcctagtccaaggtatgcggcggtcagggatttgagttgattgggatcaacgaagcgatgggtgtaccgggtgttcagtcccatcgatgtgctggtctgcgcaggagcaatctgcgcagaccattttgcggatgccctcagcagcaatgctccggttgccaggaaacggtctggccaggaacaaatccggcggcggaatacctggaaatcgactatgagggcagcaagtcagcgggaaccgtataaagcgccacttcgcccgtcggcgccagccctgcggcgcattgtttgttcctctgccacgcctctatccaactgcacttcgctgccagtgccggcgtgcttacgcccgttgcatgcttgatttggcgcgctccgcgacgtcgaacacgagcatgccagccaccattgctgccacaaagccaatggccttcggatagccagcgcccagggcaaccagcgcgggaccagggcagaagccggccagaccccagccgacgccgaaggcggcgctgcccagtaccagccgcagcgttacggccgtgctggccggcagttgcacaggcagccccaggaaggagtgtttgcggtgtttggcgatgaggaaggcgagcgagccaatggcaatggcaccggccatcacaaaagcgagggacgggtcccaggttcctgcaaggtcaagaaagcccagcaccttggccgggttggccatgccggagaccatcaggccaatgccaaatagcaggcctgcgacgagtgcagtcatggcggtcatatcagcctccaatcaggtgccgttgcacgaagacagtcaggaatcccgccaccatgaaggtgagggtggcgaccagcgagcggatggagccgcgcgagatgccgcacacgccatggccgctggtgcagccgctggcgtagcgggtgccaaggccgaccaggaagccggcggccaggatttcgccccagcttgcctggatatccgcaatggcgggcttgccgagcaggctcgcaatcacaggagcgccaaccaggccagcgaggaaggtcaggcgccaggccatgtcctttcgaggcaggctaagcaggccgccgaagatgccgctgatgccggcaatgcggccgttgaacagcagcagcacagcggccgccgcaccgatgatgagcccgccgaccagtgacaggccgggcgtgaagttagcgaggtcaatcagcatgtcgcctcctgatcggggttggcacagaactgttcataaaggaccgccatgacggcaagcgcctgggggctcgccaccgaatagaagatgttcttgccgtcacggcgcgtggccaccaggctgttctcgcgcagcacaccgagctgttgagacagcgtcggctgccggatgccgagctgttcctccagctcaccgacagacagctcgccttgggacaggcggcacatcagcagcaggcggtccggattggcaagcaccttgagcagggtacaggcctgcgccgcagcagcttgcatgctggcgaggtcgatggcggggtggggctggtccataggtcgtttacattttgcttgttaatattatattgaaaaatagaatgtatgtgaatagaatgtactgcatccaaggaggcgagcatgcacccgactatccagccgttcttcgaccctgcgacctggactgtgacgtacgtggtctttcaggaggggcgccccgagtgcgccatcatcgactcggtgctggactacgaccccaaggcgggtcggacatcgacggcaagtgctgataaggttgttgcgtttgtgcgcgcgcatggactgagagtcgagtggattctcgagacgcacgcgcatgctgaccacctgtctgccgcgccgtacctgaagcgacacctgggtggccagacagcaataggccagaacatccgcaacgtacagggggtcttcaagacgctctttaacctggagcctgagtttcggctcgacgggtcgcagttcgaccacctgtttgacgacggagcgacgtttgccatcggcggcctgaccggcagggcgattcatgtgccagggcatacacccgccgacatggcttaccagattggggacgcggtctttgtcggcgatacgctgttcatgccggacgtcggcacggctcgctgcgatttcccgggcggcgacgcacacgagttgtatcgctccatccgcaagctgctggacctgccgagcaatacacggctctttatgtgtcacgactatccgcccgaggggcgcgggcctgcatgggaaacgacggtgcgcgctcagcgcgaaggcaatatccacgtgcatgacggcgtgagcgaggaacagttcgtggccatgcgccgggcgcgcgatgcgacgctggcgatgccgacgctgcttctgccgtcggtgcaagtcaatatacgagccggggagttgccgccgcccgatgcgaatggcgttcgctatctaaaaatccctctggacgtcatctgaggcaggttgttttcaattgttgttcccattgcgatggcgacgaaccggaatgcactctcgacgcggccaccgagcgccgcagctgcgcccaggcagagcgcgccgatgccatacccgaggtcgcgccagaagcggtagatgccgatggcggacgcccgccaactggggtgtgcgatgtcggctaccgcagcgctcagattggggtacaacatcgccatgcccggcccggtcatccctcgggcttgttacggcttcgtcatacttcaccgtagtgctgccagcgacccaattagcctccgcccctgctcagaacggacagcaggcctctaacttcaatgatgctggtcttcatctcatccatcctcgcaggtcacaagttcgtgctgcgctaccgtctcacttcgaaatcgccccgctcagaagatgttcctctgcataaggaaacacaacttccggattagggcgaatcagctcagcgtccttgtgcgcatagtgaaggcgggtcagtagatccttgatgacgctgaggcgtgcgacatgcttgtcgtcggcgcgcacgacgttccatggcacgatgtcgctggttcgagcaaacatctcgttccgtgccttactgtatttcttccaaagcgataccgcttgttcgtcaatggggctgactttccactgttttagcgggtcccggcggcgctcttcgatgcgcttcttctgttcggccttgctgatgtcaaggtagtacttgataagacgaattccggaacgcacgagcatccgttcgaactctgggacacttgccatgaactcctcatgctcgtccttggtgcagaagcccatcacatgttccacaccggcccggttgtaccaactgcgattgaaaagggtgaactcgccggccgcaggcagctcggccgcatagcggcggaagtaccaggagcctcggtcacggtcggatggcttccccagtgcgacgacgcgcgtttcacgcggactgaggtgttcgacaatgcgcttgatggtcccatccttcccagacgcatcccttccctcaaaaatcaccagaatccggtcgctgcaggaaatgaagtgcttctgtagtttgaccagctcgatttgaagcaggtggagattctcctcatagctgtcatgggagagggcgcttgcctcggatggagccgtcttgctacttgtcttcattttcatggttcacctcccttgagtcgggcgcatcgggtgggaaagggtggggctttccaggtgaaagcggggtaactttttcgttgagcaacagctccagcgaagggcggtctacgacctcctgttcgagcagtagctttgccagcgcgtctggcttgtgccggtttgccagcaatgtttgcttcacccgctgactggcgtcgcccagaatcgtccgcacttctgcatcaatgatttgcgcagtactctcgctgtactctttgcgttgccgaggcattggcagcttcgaggtcctggaccagattggggtcgttgacccgaagcgtggagaaggggtggtctccctttccctggcgcaacatctcttcgacctgtggcttggggagcagagtctcaatgccagtggtgacacgagctcgtaaagagctgtggcgcaaggacttggagtcatatcgccattcttggtatcaggtctctccttgaaggctgttgtgtaaccatgcaaagaatgccccggcagcgaagaaccacaccgcaaacacaaaggctggatagatgatggaccaccacgatactgattcgccggtctgaaggcgccggaaatcgagcccgtgaaagagcgcgttcatgaaattcatgaagggctcaggaagaaccatccagacgagcgtgcatagaacgtagaacagcacgaccgtggcggatagcgtcaaaccagtcttgaagggtttcatggcagcctccgggtgcaaggaagatgacggttgaattcaatgaggacgcgtccgcggaacatctcgggctgagatatgcggaatgaacgctggtgtcttttggcgatattcctcatatgcttgcccgaactcggccagtgcgtcctgctcctccgacttggccagccgaacatacatccagaccaggatggggaacatcaccagagtgactatcgtcggccactgcagcaggaagccgaacataatcaggacgaacgcgacatactgggggtgcctcatgcgcgcatagagaccagtggtcgccaggcggtgctgctgctgggccaggtacagaatgcgccaggcggaagacagcatgatgaagccgccaaaaatcaagatgtcgctggcgatgtgaaatggccccaggtgcgggttgcccctccagccgaaaatcatctccggaagatgaccggcatcatgcgagaggaagtcgattcccgggaatttcgccgaaagccacggtagcaggagatagatactcagggggatgccatacatctctgtaaagagcgccacaatgaacgcggagaacgcgccaaacgagcgccagtcgcgctgggtcttcggcttggtgaagctgaaggcgaagatgatgaagacagctgagttgataatgaccagcgaccagagaccgtagctggattgtgtttcgggttgcatcatcgctctcctttggcgttcgtgtccttggtggcgtcatccggtccgtgaccgtgtcgatgtccaccgtgcatgaagatgtgcattaaggggcaggcggccagcagaagaaatggcaggaactgaatgacgtgtgcccggtgttcagtccataggaagtaggcaatcaccagcagaaagccaatcatgaccagcttggacctggccacggtgcgcagtgcgtcgccaggccgctcatgaccgttgtggtcgtggttcatgttttcctcctataaagcgaacgccgtaccgcctggcagcagccatggtgccgatgacgtaggtgtatgtatctcgcttggtcttgctgaaaaactgttcgccgttccgccaagcaggagccaagtgagactctgtgataaccagttcatagaccctctcttcaacctttgtcttggcgttcacgctcaactgcgtttcgtatatcgcgctcgcactgtcgcgaaaggcgaagactcaaccacaccacaacgaccggacaggacagcaggagtaggccaaccagtatggtgaacggtgtcagcccaaaccggtagacgatagctgccgcgagtagcattgcaaaggcagcgcaaatccatgccaccgggtgtttcatctcgcctccaggctggcaattctggcgccaagtcgtacacgcttcagcaatgcggagttggctaccacactcaatgaggacagtgccattgctgctgcggcaaagatggggttcaggagtccaagtgcggcgatagggatgccgatggtgttgtagatgaacgcccagaagaggttctgtttgattttgcgcatcgtcgcgcgggacagctcaatggcggcaaccacgtcacgcacgtcatcgcgaatgaggatgatgctcccagtttccttcgcgacatccgagcctgagccgatggcaatgccgatgtccgctgcggcaagcgccggtgcgtcattgacgccgtctcccaccatggccacgacctccccttgcttctgtaatgcgtgaatggtctcgaccttgtcttccggcatcacctcggcaatgacatgctcaatgccaacctgccggccgattgcctcggcggtgcggcggttgtcaccgctcagtagcacaaccttgatggcgcgcgccttcaatgccgcgattgcctcgctcgcttccggtttcacagtgtcagccacggccactacgccgagcaattgtgtgccggcgccgaccagcatggctgtcttgccatcggcctcgagcttcccgagtacagattcggccgattcgattgggatgccttggcgtgcaaagagacgccggttgcccagccagacttgctgaccgtcgacgaggccctgaatgcccatgccagacaatgcgctgatgctggctgccttgggaatggtgagcgcgcgatactgtgcggcgcgcacgatggcttcgcccaaagggtgctcggacccggcttccacagcggcagcaagagtcagcaggtcagatttctctcgcccagaaagggggatgacatcggtcaaggtcggctctccgcgcgtaatcgtcccggtcttgtcaaagacaaccgcggtgagcttctcggcccgctccagcacttcaccgccgcgtatcaggatgccgttgtccgcgcccttgccgacgccgaccatcagcgctgctggcgtggcgacgcctagcgcgcaggggcaggagataatcagaacagccacgaatgcgagcagtccctgcggaaaatgaccggcgacggtccatcccactaatgccagcatcgcgaccgaaacaaccgcaggtacgaagtagccggtgacctggtccgccagtctctgaatctgcgcggtgctggcctgggcgtcctcgaccatcctgataatctgagcgagagcggtgtccgctccgatttttgtggcctggaaggtgaaggcgccactgcggtttagcgtgccgccaatgacagcggcaccaggcttcttttccacgggcatcgactcgccggtcagcatcgattcatcgacactggattggccatcgataaccttgccatcagtgggaatcttctcgccggggcgtacaacgaccgcttcgcccaccatgatgctttcagccgggatttccacctccgtcccgtcgcgaagcacgtgagcgacggcggggcgcaggtcgagcaggcgtcgaacagcggcggaggatttcttcttgatgatttcctccatgtatttccccagcagcacgaaggcgataatgaccgccgacacctcaaagtagacgtctcgctcttcgaccttgacgggcagccaggacggaaagaacagcactactacgctgtagaagtaggcgacggacgtccccagggcgatgaggaagtccatattgatattgcgcgtccggatggcgttccatgcgcccttgtagaagctccagccgccaatgaactggaccggcgtgacgagaaggaatagccacatcccccacgtgaaccaaggcagggcgggaatcggggcccaagtcacgagcgtcgcgccggctgccagtgccaggaaggcgccagcccgcagcaccgccagcgcgagcacgcccgtgagcgcaatggtcacgcgcgtcttcatggctttcaactcgctctctggcgactcgaaggtccgaaggcagctctcgctgcagaagtagtacttgcggttgccacgctcggcggagagggccgtagccttgtccaccatcattccgcaaatagggtccttggcgagttgcttggcggcgtgggaagcaagcgcgggcgtcgccgcagggataggagcgacgccgggtgggctaggactgcgggagggcccagccgagctacgcctatcaacggggtgaagaacatatttcgccgggttggctaggaaaacctgctcacagtgtggagagcagaaccagtatcgcttctggtcgagctccgtgctggtagcggcctcccgtggggagatctccatgccacagaccgggtcacgcacgagctgctgcgaggcggccgggcctgcggcggccgttggagctgcctgggcttcggtgaggccgtaactccccccattaggggtggtggacttggtcggcattccatcctctccttggggctattaagaggggctgcagcgcataaattacattttcattctgggtgaccagtcgatttgcttcttgatttcaatcaagcgttcatgggtggtcgggggtgcggtgggtgccgattcaggaatgaatgtcgaacgccgcatgacgtatgtgtttgaaggctgggaagccgctcggccagccgatgccggcgccgaggttgctttgctccccatacaccgggcctagaagaccgctaccgtgccatagaccagctcattgaccaaggcaggaagctgcgccagctgtagcgtcgcgagttcacgaacttgctgctcctgggcgctcgagaggccgcgctcggccacgacatcaatggcaaacagttggggctggtcgatggggcgtccaattccggagagaagccggacgacgacttcatccgcgccatccacgcttgcctgaatatgagaggctaaccggtgggcgagcacgttgtagagcttgccgacatgtgacgccgggttcttgcccgctgcggcctccagcgacattggccgatagggggtaatcaggccattgacccggtttccgcggccgacctggccgtcatcaccatgctcagcacttaagccagtgaccgtcaggtaaatcccgctttcgtcgcaagcatcccggcgatcgagggtattgattgcaatctcacagtcggtgccgatgtgctcggccagatacgacccaatccggcccttgaggatgaagtactcatcgacgccttggacgcatcggtcgacaaaggccagcgcaagagtgagacggtgatgcgcacccagccgactccccatcaccttgtaatcgaggcccgccgcctcaaacattcccctgtcggcacgtgagcgcagaaggtcggcaatcaacagcaccgctctttcaagcgatgagagtggcgcatagccgacgccaaaggatgtgtcattggacagcgaaagagacgctgcattggtcacgcgccggaggttcggggccgaggggcggaggattggctcgatccggatgtcattgccaatgtcgcccaaggatgtcgccaggtactcgcgaatggcctgctcgacaactagctcggccttggccgacggaagttcggtaacagggccggatactatcaaccgcgttgagcgcagcactttgccaccgccgaactttggcgcgctcatgccgccgatgagtagcgccttgtccagattgaagtgctggactgcgccataggcttcgaagtatgcgcggcacaaggcgcgagccgcagcttcgacagccccatcgcataggctatcgggatgtccgatgcccttgtgctcgcacatttccgtctgctcacctcgccatgacggcccacgcgagatagcaatcgctatgttctccatgatggtcatctcgagcccccttcacgccgtcgccctgtagccattctatgtagccgcggtaggtcaagtcgcgaaggttcggttcccgactcgggttgccaggagttgttgacgcgaatcaagcacggtttttcgcgttgcctagcatcaatgctgaaaatatgactttcgattgccaactaagtcgcggcagggccgctggtgcactattaggctcatgtggcctggcatttgaaggttgcgaaaacgccgagcgggtgcaaaccgtcgggtggccaaggcgcgcctgccgctgctgcaaatggcgatgcttgggcatactggccggtgctttcatcgggcggggagcgctgaattccgtacgggttgccagcgacccaagtttagggttcgccaccagctgcgtgattggtagctagcctggtgttttcattagggctgctgctggtagtgcccggcgccaagctattcactgccaacaacctattagtgatggcctgggccgaccggcgaatcagcagctacgagctgctgcgcaattttggggttgtgagcttgaccaactttgccgaagcggctggactcgcattgctggttggttgccagggtatccggtgctgaacaacggactagtggctgagcgcttggagcgcattgccgttgccaattgcgccccaagcccccagccgttcattggtgtgcgcatccgtacagatgccagttacaccctggaactgtcaatggtgctgccgccggggatggatccgtggccacccgctgcaagggctgatcggctttcagtctttgccccgacaatcgctctatctccggcgcctgcctcggtcagctggtcgatcaatgcgaccttgatctcggtcggcactaacgccttctcgttctggaggccatcgcgtggaccgacttccacgatcttgactttgtctggttgcattgccggaaacctcccccacgatatcaggcttcaaacgccaggagctgcgacccttcagccacttgctcgccaaccccatagagcacttcactgacgacaccatccaccggtgcgctgatggtgtgctccatcttcatggcctccatcaccagcagcggggccccgcgcgtcacgatgctgcccgcctcgaccatcacggcaatgaccttgccgggcatcggcgcggtcagcttgccgtcttcgctttcagcctcgccagcgtgcgccagtggatcgagccaggtcaggcttacgtgaccaccggcatggaaggcatgaaacacctcgccgtcggcatgcacttggccgtgcgcgtggcgcgtaccgaggtcgacgcggatctcatctccctggcagttgcaggcgaaggacacaacctggttcgcgtagatcagcgtgctgccgcgtgcatcggtattcagcgtcacctccagcacctgctcgccatagccgaagcgcagcgtgcgcgacacgccgccgttcagccgccacgcgccgccatgggtccacggcgaatgctggtcggcggcgtcgacgcggcgctcgcgcgtctcgcggtcgagcagcgcggccaccgccagcgcaatgacttccaggccgaccggggcggcgggcgggaacagcgtggcttcgttgcgctcgatcaggccggtatcgagatcggcggtgcggaacgcctgcgacgacaccagccgttgcaggaaggccacgttggtcgacagccccaccacgtgatacgacgccagcgcctggcgcatgcgcgccagcgcctcgtcgcggtccttgccccagacgatcagcttggcgatcatcgggtcgtagaaggggctgatggtgtcgccttcgcgcacgccggcgtcgatgcggatgccggccgggccatgcacatcaccaccgcgcatgaactgcaccgccggcggtgtgcgcaggtagcgcagcgtgccggtggacggcaggaactgtttgtcggggttctcggcgtagatgcgtgcttccagcgcatggccgtcgatgcgcagctgctcctgcgtgagcggcagcggctcgccggcggcgacgcgcagctgccattcgaccaggtcctgcccggtgatcatctcggtgacggggtgctccacctgcaggcgcgtgttcatctccatgaagtagaacgaaccgtcctggttggcgatgaactccaccgtgccggcgccgacatagccgaccgccttggccgcggccaccgccgcttcgcccatggcgcggcggcgcgcctcggtcatgcccggcgcgggggcttcttccagcaccttctggtggcggcgctgcaccgagcagtcgcgctcgaacaggtagacgcagttgccgtgggtatcggcaaacacctggatctcgatatggcgcgggcgggtcaggtacttctccaccagcaccttgtcatcgccgaagctggccgacgcctcgcgcttgacggaggtcagcgcggccatgaagccgtcgcccgactcgaccacgcgcatgcccttgccgccgccgcctgcgctggccttgagcagcaccgggtagccgatgcggtcggcctcgcggcgcagcagcaccggatcctggtcctcgccgtggtagcccggcaccagcggcaccgcggccttctccatcaattgcttggcggcgctcttgctgcccatcgcgtggatggcagacgccggcgggccgatgaagaccagccccgccgcggcgcaggcctcggcaaaggcctcgttctcggacaggaagccgtagccggggtggatggcctgggcaccggtctccttcgccatctcgatgatgtggtccgcgcgcaggtagctgtcgcgcgcggccgcgccgccgatatgcacggcctcgtcgcagaaggcgacgtggcgtgcgtcggcgtcggcatccgagtacaccgcgacggtgcggatgccgagccggcggcaggtggcggccacgcggcaggcgatttcaccgcggttggcgatcaggatcttgttgaacatcggtcttccttgtcgtgattacatgcggaacacgccgaacttcatgtcctcgatcggcgcattcaggctcgcggacagtcccaggcccagcacggtgcgggtctgcgcgggatcgatcacgccgtcgtcccacaggcgcgcgctggcgtagtacggatggccctggtgctcgtactggtcgcggatcggctgcttgaacgcctcttcctcttgcgcgctccacttgccgcccttgccctcgatgccgtcgcggcgcaccgtggccagcacgctggcggcctgctcgccgcccatcaccgagatgcgcgcgttcggccacatccacaggaagcgcggcgaataggcgcgcccgcacatgccgtagttgccggcgccgaacgagccgccgatgatcaccgtgaatttgggtacctgcgcggtggccaccgcggtcaccatcttggcgccgttgcgcgcgatgccttcgttctcgtacttgcgcccgaccatgaagccagtgatgttctgcaggaacaccagcgggatcttgcgctggcagcacagctcgatgaagtgcgcgcccttcagtgcggattcggagaacaggatgccgttgttggcgacgatgccgacggggtagccccagatgcgcgcgaagccgcacaccagcgtggtgccgtagcgcgccttgaactcgtcgaactcggagccgtcgaccaggcgcgcgatcacctcgcgcacgtcgtagggcttgcgcgtgtcggtcgggatcacgccgtacagttcttccaccgggtacagcggctcgaccggctcgtgcaggcggatctggtccggcttgcggcggttcaggtgctgcacgatattgcgcgccagcgacagcgcgtggtggtcgttctgcgcgaagtagtcggccacgcccgacaggcgcgtatgcacgtcggcgccgcccaggtcttcggcgctgacctcctcgccggtggcggccttcaccagcggcgggccgcccaggaagatggtgccctggttcttgacgatgatggactcgtcgctcatcgcgggcacgtaggcgccgccggcggtgcacgagcccatcaccaccgcgatctgcgggatgccctgcttggacaggttggcctggttgtagaagatgcggccgaagtggtcgcggtcggggaacacgtcgtcctggttgggcaggttggcgccgccggaatcgaccaggtagatgcacggcaggttgttctcctcggcgatctcctgtgcgcgcacatgcttcttgaccgtcatcgggtagtaggtgccgcccttgacggtggcgtcattgcagacgatcacgcactcctgcccggccacgcggccgatgccggtgatgatgccggcgccaggcgcggcatcgtcgtacatttcgtacgcagcaagctgcgacagctccaggaacggggtgcccggatccagcagttgctgcacgcggtcgcgcggcagcagcttgccgcgcgacaggtgcttgtcgcgcgcgtccttgccgccgccttcggcgagcttcgcgatcctggcctccaggtcggctaccagggcctgcatggcttcggcgttggccttgaaggactcggagcgggcgttcagtttggtttcgatgattggcatatcgtgcttctgggtgtgccgcgagatggtgctgtcggtcggcagatggcgaaggtaggcgcgcttacatggtttccgcgaacagctcgcggccgatcagcatgcggcggatttccgaggtgccggcgccgatctcgtacagcttggcgtcgcgccacaggcggccggccgggtattcattgatatagccgttgccgcccaggatctgcacggtctcgcccgccatccaggtggccttctcggcggtgtacaggatcaccgcggcgcagtccttgcgcacctggcgcacgtgcccgctgcccagcgcgtccaggttcttgccgaccgtgtacaggtagctgcgcgcggcctgcagcgtggtgtacatatcggccaccttgccctggatcagctggaattcgccgatgctctggccgaactgcttgcggtcgtggatatacggcgtgaccacgtccatgcacgcctgcatgatcccgaccgggccgccggacagcaccgcgcgctcgtagtccagcccgctcatcagcaccttggcgccgccattctcgacgccaaggatgttctcgaccggcacttccacgtcctggaacaccagttcgccggtgtgcgagccgcgcatgcccagcttgtccagcttctgcgccaccgagaagcccttcatgcccttctcgacgataaaggcagtcatgccgcgtgcgcccagctcaggctcggtcttggcatagaccaccagcacgtcgcagtccgggccgttggtgatccacatcttggtgccgttgagcacgtagcggtcgcccttgaactcggcgcgcagcttcatgctgaccacgtcggagccggcattgggctcgctcatggccagcgcgccgatccattcgcccgagaccagcttgggcaggtacttcgccttctgcgccggcgtgccgttgcggtggatctggttcacgcacaggttggaatgcgcgccgtacgacaggcccaccgacgccgaggcgcggctgatctcttccatcgcgatcatgtgcgccaggtagcccatgttggcaccgccgtattcctcggccacggtgatgcccagcacgcccaggtcgcccatcttcttccaggcgtccatcgggaactggtcggtgcggtcgatctcggcggcgcgcggggccagttcggcctgagcccaggcgcgcacggaatcgcgcagcatttcgatgtcttcgccgaggtcgaacttgaggccggggagggtgttcatagcggtgttgtctctggtgttgtctgtgggagcggggggattggctggcgccgtgcaccggcgccagcgcgtcaggccgtcctggattcgctgagtttcaggtcctgcgtcatgcgctcgcgcatcacgaatttctgtaccttgccggtgatggtcatgggcatctcgtcgacaaagcggatgtagcgcgggatcttgtagtgcgcgatctggtcgcggcagaaatcgcggatctcgtcctccgtggcgctcgcgccgggcttgagcacgatccacgcgcagacctcttcgccgtacttctggtcgggaacgccgaacacctggaccgcctggaccttcggatggcggaacaggaactcctcgatctcgcgcgggtagatgttctcgccgccacgaatcagcatgtccttcacgcggccgacgatgttgcagtagccttccgcgtcgatggtggcgaggtcgccggtgtgcatccagccgtcgcgaatggcttcggcggtacgcgcctcgtcatcccagtagcccagcatcaccgaatagccgcgggtacacagctcgccggtttctcctacgggaaccgtggcacctgtcgcatccacgatcctgacttcgaggtgcggctggatgcggcccaccgtggtcgtgcgcttgtccagcggatcggtggtgctgctctggaaggagaccgggctagtttccgtcatgccgtaggcaatcgtcacctcggacatatgcatctgcgacaccacgcgcttcatggtttcgatcgggcagggtgaccccgccatgatgccggtgcgcagagaagagaagtcgtagctcgcgaagttcgggtgatcgagctgggcaatgaacatggtcggcacgccatgcaatgccgtgcagcgttcttcgctgactgcctgcatggtggcttccggctcgaaggcctggccggggaacaccattgccgcgccggaggacacgcaggccagcaccgccaggaccatgccgaagcagtgatagaagggcaccgggatgcagagcttgtcctgctcggagaaacgcatcgccatggcaatgaagcgtgcgttgttgacgatattgcgatgggtcagcgtggcgcccttgggcgcaccggtagtgccgctggtgaactgcacgttgatcgggtcatggcggtccagctgtgccgtgatggcatccagcgtcgaccgagccacgcctgtgccgcgcgcaatcacgtcggcatagcggagcatcccgggtgtatggtcgtcgcccatgcggatgacgcagcgcagtgccggcagccgcgccgcctgcagttcgcccggcgcgcaggtggccagttcgggggcgagtacctggagcatctccaggtaccgtgaggtcttgaaggcttccgccgcgacgatcgccttgacgcccaccttgttcagcgcgtactccagctcggacaggcggtaggcgggattgatgttcaccagcaccagccccagccgcgccgtggcgaactgggtgaccagccactcgacccggttgggggaccagatgccgactcggtcgcctctggccagccccagcgtgtgcaggcctgccgccagtgcgtccacggcatcggagaattcgcgccagttccagcgcaccccttgctcgcgaaaggcaacggctttccgctcgggatagcgagccaccgtttgcgccagcaactccggcacggtctgttccgacagcggaatggtggtgtcccctctcacatgcgaaagcccgccaatcggcaggatggtgggagaggactcggcctgcatcgtcatacttgtctccaaagcccggttgtggttcgtcacgttggatatttgtgagtgttactcaataaacagcgcatcgatggattctggggtggcgtctccgggttttcccggatatttgcggcgcggttgctttatttttggctattccttcgaggctcgcctgacacccgttggtgcgatgatcgaaaaatacatggtgccaatcgaaatggcaacctaaaattgagtaaagctcaagtcagggctgagccggccctataatctcgccttcgggcaagcaaggactcaatcaagatggaagacgtcacatcgccccgccgtgtgccggcgggcgccaaggcggaacaacgcatccgggacatcctgcgcgtcagccgcgaggtattcgccgagctcggctatgagcggaccacgaccaccgagatcgcccagcgcctgggcatctccgagggcacggtgttcacctacttccatggcaagcgcgagctatgcgcacgcgtgatcgaggactggtatgacgagatcatcagcaccgtggaacaaggcatgccgcacgggcaaagcacaaaggtgcagctggagttctatgtcaggacacacctgcggttgttcctgatccaggggacgggcttgtgtgcgctggtgttgtcggaggggcgtgcaaaagggccggggctgggagaggtgttcgtaccgctgcagcgccgctatacggcaccgttgatggacttgctggcgcgggcgcgggacaacggcgagatccgggatgacctgccgttgagcctgctgcgctcggcaatcctcggcccgatggagcacatcctgtgggacgcgatcgcccggcagcggcaagtggatatcgagaagacggccagggatatggtggcgttgttgtggcccgccttgctgcctgtagacgtcgaggtggagaaattgcgcgcattctatggagaagtcggcgcagcattgagaagggcgggcaacggttgacgtgcggcgcgccttgaagcgccggtccactaatccactgatctagttcttgcgagggacccttgccggattcatgcgccgccatacgcgatcgcctgctggcggccctgcacgtcttcgaataggccttaatctaccagggcgaacgcccgtcgatttccattgatggcagccccagcagcgcgcgcgcctgggccactgtcgccacggggcgcccatattcctcgcacaaggccgctacctggctgaccagcgcggcgttggagggcgccagtgtctgcttgtcaagccgcacattgtcttccaggccggtgcggcaatggccgcccagttcgagcgaccagcgcgccatcgtcagctggtcccggccgatgccagcgccggtccaggtcgcatcgggtgccaggcgccgcaaggtgtgcacgtagaaggcaagcacctcgcgatcgaccggcatcgcattcttgatccccatcacgaactggatatgcagtgcgccgtcgatcttgccggcctgttgcatggccaccgcctggaagatcatcgacaggtcgaaggcctctatctcgggcttgatggcgtaggccttcatttccgcggcgagccagtccaccaggtctggcggattgtcatagacgcgagtggggaaattgaccgagccggtggcaagcgacgccatgtccgggcgcagcgacagcatcccccctcgctcccttcccgcgcctgagcggccgccggtggagacctgcgtgatgatgcccggcgcatgcttgcggatgccctccagcacgcgggcaaagcggtcgggctcggaggagggcgtctcgtcgtcattgcgcacgtgcaggtggacgagcgtggcgcccgcctcgaaggcggcctgggtggattcgacctgctcgctgacagtgatcggcacggcagggttgtcacgcttgcgcggcagcgagccggtgatggcgacggagatgatgcagggctgggtcatgtcggctccggtaaggatgtatggcatcacgcctgtgacaggaagtggatcaccgcgtgcgaaaacgcctcgggcaactcccagttggacaaatgcgcggcgttgagcgcgaggtattcggcgccggcaatgccttgcgccagctcgcggccctgttccggcgtggtggcggcatcctgcacgcccgcgatcaccagcacgcgcgagcggatgcctggcagcaggccgcgcaggtcggcgtcgcgcacggcggcgcagttggcgatatagccatcggcatccgtggatgcgagcatggcgagcacgggcgcgatgtgcgccggatcgccggccagcgcggccggcgtgaaccagcgggccagcacgcccccggcgattgccgccatgccctcgttgctgacgcgctcgatgcgcgtgttccagccggacgccgggccgatcagcgccgcggtattggccagcacgaagcggccgaagcgttcgggatggtggcgtgccagccagatgccggtcatgccgcccatcgacaggccgcagaagtgggcgtgctcgacaccggcatggtccatcaccgccagcacgtcggccccgagctcggccatgccgaacggcgctgccggcacgccggaggcgccatggccgcgcgtgtcgtagcgcagcacgcggaagcgctccagcagcgccggcatctgcgggtcccacatcgacagggtggtgcccagcgagttggacagggccagcaccggcgcgccggccggaccgttaagttcatagtgaaggcgaagcccgtcgcgggtggcaaagcgcatgacgtgggctccctcagcggatcgatgaaggatgcggcgccagcggcgtgacggcgatcttcatgtacgggaacagcggcagccccgacagcagcgtgtgcagcgtctcgttggactcgacgtcgaacacgctgtagttggcatactcgcccaccacgcgatagagctgctgccacttgccctggcgctgcaggtcctgcgcataggctttctcgcgcgccttgatgtcctccgcctgcgcggcgggcatgtcgtgcggcaggcttacgtccattcgtaccagatacagcattggtgtctcctcgcttcgattctgatggggtctgatggcagggaatcaggcgcggtcgcgccggtagtgggcgagcttgtcctcgtccagcgccatgcccaggccggggccctgcggcaggtgcaacgcgaagtcgcggtagacggggcgctcggcgacgatgtcgtccttcagcagcagcgggccgaacagttcggtgccccacgccagttgcggcagggtcgcaaagccgtgggcggcggcaatggtgccgatgctgccttcgagcatggtgccgccatacagcgcgatgccggccgcatcgcccaccgcggccgtgcgcagcatgccgaagatgccgcccgacttggcgatcttcagggcgaacacgtcggcgccgccgatgcgggccagttccatcgcgtcctcgggcccgcacaccgcttcgtcggccatgatgggcaccacgaaacgcgccgccaggcgcgccagcgcggcgcgttgctcgcgtggcgtgggctgctcgatcaggtcgatgccggcggtctccagcatggcaatgccggtggcggcatccgcttcgttccaggcctggttgacgtccaccgtgacacgggcgcgctcgcccagcgcgcgcttgatcgcggaaacgtgtgcgacgtcctcgcgcacgctgcgccggccgatcttgagcttgaaggtatcgtggcggcgctcggcgagcaggcgctcggcctcgtcgatgtcccgcgcggtgtcgccgctggcgagcgtccacagcaccggcagggtgtcgcgcacggcgccgcccagcagtgtcgccagcggcacgccgagacgcttgccctgcgcgtccagcagtgcggtctcgagcgccgacttggcgaagcggttaccgcgtgcgaccttgccgaggcgcgccatggcgccatgcacattggccgcatcctggcccagcagcgccggtgcaaggtagctgtcgatggtcagcttgatgccctcggggctctcgtcgccgtaggaaagtccaccgatggtggtcgcctcgccgaggccttcgatgccgtcggcacagcgcaggcggacgatcaccagcgtctgccgctgcatggtcgccatggcgagctgatgcggccggatggtcggaagatcgaccaggatggcctcgatggactcgatggccgtgatgctttgctgcgtcgccactttcataccttcctgatgcagttgaacgttgcaccggagtatggagggctatttttggggtgtccaagaccgttggcgtctgatttcatacctacagagtatgaaccgcccgttgcgccttattccttcggcggcggcaggtaggccatgccctcatcctcgtagagctggtagatcatgtcccgcagcgagcgcaggtcggccgactcgtccagcatgcgcgtgctcatgataatgggcgacaccagcttgggatcgtccagttccttgtaggtcacgtcgccccgcttgagcccgtagacgctgctcgggaccaccgagatgccttcgcccatcgccaccagcccgagcgcgatttgcagctcgcgcacctcgtgcaggcggcgcggcttcagggcgcggtcgtggaaggcggccagcacctggtcggcaaagctcgggcgcggcgccttggggaagatgatgagcggctcgccgaccaggtcgtgcagcgcgagctcgggcttggcgtcagccagcggatggccgaccggcagcgccacgatcatgcgctcctcacgcagcaccacgcgccgcaccgacgggtcttcgtggcgaatgcgcccgaagcccacatcgatgcgcccctccttgagcgccttgatctggtccatggtcgacatctcgtgcaggctcagttcgagatcggcgtgcatctgccggaagcgccggatgatccgcggcagcatcccatacaacgtggagccgacaaagccgaccgacatcttgtgctcgatcttgccgacccgcttggtcatcgcctgcagttccgcggtctgggccagcagttgcagcgcgtgggtatagaagaagcgcccggtatcggtcagtttcagcgggcgcgagtggcgctcgaacagttgcacacccaggtcgtcctccagttgctggatctggcgcgacagcggcggctgtgcgatatgcagccgctcggccgcccgggtgaagttgcgttcctctgccaccgccacgaagtaacgcaggtgccgcaattccaagactatacctcctgagtatcgatgggatactaaatcagtgttggactgccaaaactgccgttgactatgctccatccgtgcccggaagacaagctcgatacctgcaaagcatgaaccgggacccaaccacaactatggagacccccatgactcactcggaaatcgacgccctggtccacagctttatcgtcgccaccggcacgcaaggcacccccgacccgcgcgtgcagcaggtggtagtccgcctgaccgcggacctgttcaaggcgatcgaggacctcgacctgagcgccagcgatgtctggaagggcatcgagtacttcgccgaggcgggcgccacccaggagttgggcctgctcgccgccggcctggggctggagcgattcctcgacgtccgcgccgacgaggccgaagcccgcgccggcctgaccggcggcacgccgcgcaccatcgaaggcccgctctacgtggccggcgccccggaaagcaccggctttgcccggctcgatgatggtagcgacgacggcaagggcgaggtcctgttcatgcaaggcacggtgtacggcgccgacggcaagccgctgcccggcgccagggtcgaggtgtggcatgccaacctgatgggcaactactcgttcttcgacaagacccagtcgcacttcaacctgcgccgcaccatcgtcaccgatgcaaacggccgctaccagttccgcagcaacgtgcccaacggctacggctgcccgccgcaaggcaccacccagcgcctgctggaccagcttgcgcgccacggccggcgcccggcccacatccacttcttcgtgtcggcggacggccaccgcaagctgaccacgcagatcaacatcgacggcgacgaatacctgtgggacgacttcgccttcgccagccgcgaggggctggtgccggcggtgacccgcgtcaccgaagccgccgcgctcgacaaacacggcgtggacaagccgctcgcctcgatcgacttcgatttccggctgctgccggagcaggccggcgcccccgccgccgaggtggagcgccagcgcgccgccgcctgattttccgcaatgccgcccgccgcgcgggccggtagatccagtccgggcggcagcgccatgcgcagcgccgccccggcgacaagacatcggcaggagacaactccatgatccccatctatccggagggcaaggcccccgttcgccccggcgcaaagcgcctcgacctggataccttcctggtggaagacaaggcaagcggcgactaccggctgcaccgcgcggccttcactgacgaagagctgttcgaactcgagatgaagcacatcttcgagggcaactggatctacctggcgcacgaaagccagatcccgaacaacaacgactactacaccacccatatcggccgccagccggtggtgatcgcgcgcaatcgccagggcgaactgaacgccttcatcaacgcgtgcagccaccgcggcgccatgctgtgccgccacaagcgcggcaacaaagccacctacacctgcccgttccacggctggaccttcaacaacagcggcaagctgctgaaggtgaaggatcccgagaacgccggctaccctgactgcttcaacaaggaaggctcgcacgacctgaagaaggtggcgcgcttcgagaactaccgcggcttcctgttcggcagcctgaacgctgacgtgccgccgctgaaggatttcctgggcgaagcggcgcgcgtcatcgacatgatcgtcgaccagtcggccgacgggctcgaggtgctgcgcggctcgtccacctacacgttcgagggcaactggaagctgcaggccgagaacggcgccgatggctaccacgtgtcggcggtgcactggaactacgccgcaaccaccagccagcgcaagcagaagaacgcgcaggaagacaagatccgcgccatggacgccggcaagtggggccagcagggcggcggcttctacgccttcgagcatggccacatgctgctgtggacgcgctgggccaacccggaggaccgccccaacttcagccgccgcgaggaattcgccgagcgttgcggcgccgagaccgcggactggatgatccagaactctcgcaacctgtgcctttatcccaacgtctacctgatggaccagttcggctcgcagatccgcctgctgcgtccgctggccgtcgacaagaccgaggtcaccatctactgcatcgcgccgaagggagaatccgacgaggcgcgcgcgcgccgcatccgccagtacgaggacttcttcaacgtcagcggcatggccacccccgacgacctcgaggagttccgcgcttgccagcagggctacgccgggcaggcactggcctggaacgacatgtgccgcggcgcgaagcactggatcgacggtgccgacgaggccgcgcagcgcatcggactcaagcccgtgatgagcggggtgcgcaccgaggacgagggcctctacacggtgcagcaccgctactggctggacgtgatgaagaaggccgtggcagagcaatccgccgaagccgcgaatgaagccaccgacaccaccgacgccgccgcagggagcgcagcatgagcaccgccgacatcaccctcgaccaaccggtcgacatggccgccatccagtccttcctgtaccgcgaggcacggctgctggatgacgaagagtgggacgcatggcttgcgtgctaccaccccgacgcaaagttctggatgccctgctgggatgacgacggcaagctgatcaccgacccgcagcgcgagatctcgctgatctattacccgacccgccagggcctggaggatcgcgtgttccgcatcaagaccgagcgctccagcgccaccattccggacacgcgcaccagccacaacctgagcaacgtcgaagtgctcggggtggcgggcgacacctgcaccgtgcgtttcaactggcacacgctgagccatcgctaccagaccacctacagctacttcggcatgtcgcgctacacgctcgacctctccggcgcgcagccgcgcatcctggacaagtatgtcgtgctcaagaacgactacatcaaccaggtcatcgacatctatcacatctgatccaggctggaggaacgcgccatggaacacaccatcgccctgcaattcgaagacggcgtcaccaggttcatcacctgcggcgagcacgagaccctgtccgatgccgcctaccggcagcagatcaatatcccgctggactgccgcgacggcgcctgcggtacctgccgcgggctgtgcgagtcgggcagctatgacctgcccgaatccagctatatcgaagatgcgctgaccgcggaggaagctggccagggctacgtgctggcctgccagacgcgcccgcgttcggactgcgtgattcgcgtgcccgcctcgtcggccgcgtgcaagaccggcgtcaccacctaccaggggacgctggccgagctggaacagctctccgattcgaccatcggcttttccatcgacctggacgaggccgccggcctggacttcctgcccggccagtatgtcaatgtcgagatcccgggcaccgggcagacgcgctcctattccttcagctccgcgcccggcagcgcgcgcaccggcttcgtggtgcgcaacgtgccggaagggcggatgagcacctggctgaccagccaggccaagtccggcgagcgcgtggcgttctcgggtccgtacggcagcttctacctgcgcgcggtgacacggccggtgctgttcctggccggcggcaccggcatcgccccgttcctgtcgatgctcgatgtgctggccgccagcggctgtgcgcagccggtgcgcatggtctacggggtcaccaacgacatcgacctggtggcgctgtcacgcatcgatacggcccagggtgccttggccggcttcgaataccgtacctgcgtcgccgacgctgccagtaaccacccacgcaagggctatgtcacagcccatgtggagccggaatggctcaacggcggcgatgtcgacatctacctgtgtggccccgtggcgatggtggaggccgtgcgcggctggctgcagcagagcggcatcacgcccgccggcttctactatgagaagttctcggccagcaacgcggcatgagcaaggagcacgacaacatgagaactgctacacgctttgccggcaaagccatgatcgtgaccggggccgcgcaaggcatcggccgcggcgtcgcacaggccgccgccgccgagggcgcctcggtggtgctggtcgaccgatcggcgctggtcgatgaagtcgcggcgcagatcgttgctgcgggcgggcaggccatcgcagtgcacgccgacctggagcgctatgccggcgccacgcagatggcgcaggcggccgaagcagccttcggccgcatcgacatcctcgtcaacaacgtgggcggcacgatctgggccaagcccttccaggcctatgaggaggaccagatcgaagccgagatccggcgctcgctgttccccacgctgtggtgctgccgcgcggtgctgcccggcatggtcgcgcgccggcagggcgtcatcgtcaacgtgtcgtcgattgccacgcgcagcatccaccgcgtgccctacgcggcggccaagggcggcgtcaacgcactgacggccagcctcgccttcgagcatgcgcacgaaggcgtgcgcgtcaacgccgtggccaccggcggcaccgaggcgccgccgcgcaggattccgcgcaacatggcagcgcagagcgagcaggaggccatctggtaccaggccattgtcgaccagaccagggcctcgagcctgatgcaccgctatggcacgatcgacgagcaggtccatgccatcctgtttctcgcctcggacgaggcttcgtacattaccggcacggtcttgccagttggcggcggggatcagggctgatgagccagcgtctgggtggaatcgattggagcgcagtccgaccgccgagggactgcagcgtgttgcattgttcggcttacagccttcattggcagataggagtcagatcatgaccaagccctcgatcattctggcgcacggtttctggggaggtgccgcgcattggggaaaagtcatcgttgaactggcgcgaaaggggtatacgaacgtccgcgccgttgaaatgccgctgacatcgcttgctgacgatgtcgagcgtacccgcaagatgattgcccagcagaaggggccggtcctcctggtggggcattcgtacggtggtgcggtgattacccaggcgggtgaccagcccaatgtggtggggcttgtgtatatcgcgtcgtttgcgccagatgcgggggagagccccggtggcattacgcatcagcatcttccggttgcggcgcccaatctcgaacccgacagcgacggctacttgtggctcaaatccgataagttccatgagagcttctgccaggatctttcgcccgacgacgcgctggtgatggcggtgacgcagaaggcgccgcttgcaagcaccttcggcgacgtcatcacgacgccggcctggaaaaagaagccgtcctggtaccagatttccagcgaagacagaatgatcgcccccgaaaaccaactgaagatgtcggcccggctcaatccccggaaggtcgtgactctggcggcaagccatgcttcgctggcttcgaagccagccgaggttgcagcgttgatcgacgaagccgcgacggagtcggtcaggggatagcgccctgaacgccccgccggaccagtgcgccgaacagcggaaagctgcacggtcaagggggagccccccggctacagcatcgctgaatgcaagtgatgcggattatcgagcgtttccgcgatgatccgcagcgactcctcgatctcatcgcgctcgcccgggccgcccaggcagacacggatcgcatcgggcgggttgccgtcggtcgagaaggcggcggccgataccgcgccgatgccgcgcgagcgcaagtgcagcgccagttccgacgggctccacgctgaagccgccgggatcggcagccacaggtgaaagccctccgggtccgcgtcataggccaggccctcgagcacatggcgcgcaatcaactgccgcgccgcgctttcggcgcggatggccttgagcatgtcgtccaccgttccgtccttgatccaggatgtagcgagcaatgtgttgatggggctcgccatcaccgtcgttgcccgcagggtgccagccaggcgctgcgcctgccgggcggtgggggcgtgcaggaacgctatgcgcagcccggcgcccaggcatttggacaggccggtgacgtaatacgtgagttccggggcgagcgcggcaaacgtctgtggtgcccgcagcggcagcatgccgtaggcatcatcctcgatgatcggcacgctgtagcgcagcgcgacttcggcgagctgctcgcggcgtgcctgcggcatggtgcgcgtgctcgggttctggatggtcggattgcaatagagcgccgccggcttctgtgtcttgcacatggcttcgaaggcgtgggcgaacgggccatcctcgtcgccgggcagcgcctgtagctggatattgagctgcgcggcgatggccttgatgccggggtaggccagcgcgtcggcacagatggtctgcgccggccgtgcgagctgcgacagcagtgcaaccagcgcgctgtggatgccgggcgtgaccagcacggtgtccgcgctgcatgccggcacccagcggcgcagccatttcgcagcaaccgagcgatcggccggggttccgccgaagtcctggtagcgcagcagcgtgtagggatcggcagcctccagcagttgcgccatggcggaacgaagccgcgctgtcatcgcgggcggctccggcggcatgttcatggacatctccgcacccgtgccgccgcgcagcggcatcgcgggcgcacgtccgcgcacgtaggtgccacttcctgtcttggtgtcgatcaatccccgcttcctcgcttcactgtagccgcgcgccacggtggtgtagttcagttgcagcgcttcggccaggtcgcgcagcggcggcagccggtcgcgcgcgcgcaactggccgtcggccagtgcctcctcgatcaggtccggaatcagtaaataggccggcttggcactgccggcgatacgttttacccaatggctggtcaggttggacaccgtggtctcccgctgcgcgatgcgatggcattcagtgccctgagggtagcacccgaatgatcgcttaccaagccgcacaagcgattgcatcagaagttctcaatgatggtgcgatatcagcgcggatgcaccacgcgtgcgcaccaggcggctggttcccgttcaaaaatgtgcattgtggcgaagccgtcatggcgtgcgctgtgcgcctttggtggcatccatggccaaagccgttgcgatcattgggccgatcatttggtcggcttcggcttgattggagattgatcgcatgactgcgggcattgcgtggcacatcggttgcggatgttggcgtgttcggcctggcgccgaacggtcgatcggcaagggatcggtcggccgcactgccccatcaacgcaacggagagaagcatgcctgctgtcagcaaaccggcccacaagaagggcgatttcctggtcgactatgaagagaaggtattcgaggacgtaaaggccgaagccggcgagaaggcgctggtgaccttccacaccgtcgccttcgaaggctcgatcggcttcgtcaacatgctgcaggccacgcgcctgctgcgcaagggcttcgagacctcgatcctgctgtacggccccggcgtgaaccttggcgttcagcgcggcttcccgacgcttggcgacgaggcattccccgggcatatgaacttcaacaagcagctcaccaagttcatggacgagggcggcaaggtctacgcctgccgcttcgccctgcaggccctgtacggccacggcgaggcctcgctgatcgagggcatccgcccgatcaatccgctcgatgtgctcgacctcaagctgctgcaccgcaaggagaacgcgctgatcatcgatacctggacggtctgagcgaaagggcaggtgccaccatgtcacagaaacgcattgtgcgcgcggccgcggtccagatcgcgcccgacctcgagagcggcgcaggcacgctggccaaggtctgcgaggcgatcgacgaggccgccgggaaaggcgtgcagctgatcgtgttcccggagaccttcgtgccgtactacccgtacttctccttcgtacggccgccggtgcactccggcagcgaccacatgcggctgtacgagcaggccgtggtggtgcccggcccggtcaccgatgccgtcgccgggcgcgcacgccggcacggcatggtcgtggtgctcggcgtgaacgagcgcgaccacggcagcctgtacaacacgcagcttatcttcgacaccgagggcaacctcgcggtcaagcgccgcaagatcacgcccaccttccacgaacggatgatctgggggcagggcgatgcggccggcctgaaggtcgcggacaccgcgatcggccgcgtcggcgcgctggcgtgctgggagcactacaacccgctggcccgctatgcgctgatgacccagcacgaggaaatccactgcagccagttcccgggctcgctggtcgggccgatctttgccgagcagatcgaagtcacgatccggcatcacgcgctggaatccggctgcttcgtcgtcaacgccaccggctggctgaccgaagcgcagatcgcctccgtgaccaccgatccggcgctgcagaaggcgctgcgcggcggctgcaacactgcaatcatctcgccggagggccagcacctggcgccgccgttgcgcgagggcgagggcatggtcattgccgacctcgacatgtcgctcatcaccaagcgcaagcgcatgatggattcggtgggccactacgcgcgcccggaactgctaagccttgccatcaatgagcggccggcggcgacggcagtgccgatggcaggcgccttctccaacttccatgggagtatccgcgatgacatccagcgcgagcgtgccggcttcgagccggcaattgatgactgaactgcagtccgtcgggctgcgcctggaagacccgaatgccggcgcggccagccggcgcggcggggcgggtccgtccgatcacaaggcggtcaccatcgacggcgtgaccatcatggtgccggtgcataccagtaccgcgtggcactcgccgttcgtggcgcattcgcccgacggaacggggcgcagcgcgctgatgcgcggcaccatcccgattgccagcatcagctttccgaaggcgccgcgtttccatgcgctgcagaccctggagggcatcccgtactcgcatatcgccacgctgcatggcgccgatgtgctggccaccacggtgctgcagacttgcatccgctacgagagccgcaaaaagacctgcaagttctgctcgatcggccagtcgctggcggcgggccgcacgatcgcgcgcaagacgccggagcaactggccgaagtggcgcgcgccgcagtgctgctcgacggcgtcaggcatatggtgctgaccaccggcacgccgccgacgccggaccggggcgcggctattctttgcgagagcgccttcgccatcaaggccgcggtcgacctgccgatccaggcgcagtgcgagccgcccgacgacgaccgctggtttgagcgcatgaaggccgccggcatcgacacgctcggcatgcacctcgaggtcgtcacgccggcgctgcgcgagcgcatcatgccgggcaaggcgggggtgcctccgagccgctacatggaagccttcaaggccgccgttgcggtgttcggcagggcgcaggtcagcacgtacatcctcgcgggactcggcgacaccgcggaagccatcctgtcgatctcgcgcgagctgatcgagctcggggtgtatccgttcgtggtgcctttcgtgccgatctccggcacgccgctggaggaccacccggcaccctcgccggccttcatgcagtcgatcctgcagccgctcggcgccatgctgagcgccgccggcatgcgctcgtccgacatcaaggcaggttgcggcaagtgcggcgcgtgctcgtcactggccacctacgagcgcgaggcggcactggcgaccgacggagcgacatcatgaaaagcgatctctgcgtcgaggtgccgggcatcccgatgttccgcatccgctgggcggagcacacctgggaggcggagcaggcctatcgcctgcgccaggccgtgttctgcgaggagcagggcatctttgcgggcgacgaccgggacgcggtggacgacgtggcgcaactgctggtggcggtgcgcttcgagccggaattgccccgccatcccggcaccgtggtcggcacggttcgcatccatgaaagcgagccgggcgtgtggttcggctcgcggcttgcggtggatgcggcataccgaagccagggcaagatcggtgcgacgctgatccgcctggcggtgagcagcgcccacgcgatcggctgccggcgcttccttgcgcacgtgcagagccagaacgtgcccttgttcaggcgcttgcattggcacgtcctggcagaggagacgctgctcgggcggcctcaccacctgatgcaggcagacctgaaccattacccaccttgtcatacgccgcacgcgggcctgattgcggaaggcagggccgtgcgatgagcctcgacgacctcgtacacaccttgcgcagcagccggggttttgcgcataagaccgatatcccggccatgctgtcgccactcggcgccgcggccaccggacgcaacgcggccatggctgtcgatgtcggcgacgactgcgcggcatggcgggatggcgacggctacctgctgttcgccattgaaggactggtcagtgatttcatccgcacgatgccgtggttcgccggctacagcgcggtcatggtcaacatcagcgatatctatgcgatgggcggcaggccgacggccgtggtcgatgcgctatggagccatggcgccgccgacgccgctgaagtgctcaagggcatggcagcggcgtctgccgcttatggcgtgccgatcgtcggcggtcacagcaacgcgcgcagcgaggaaagccagcttgccgtggcgatcgttggccgggcgcgcaagctgctgtcgagtttcgcggcgcgtcccgggcagcgcctgttgatggcggtggacctgcgcggcgcgttcgcggagccgtacccgttctggaacgcatcgacgggcgcgccgggcgaacgactgcgcgcggatctcgaactcttgccggtgctggccgaagacggcctttgcaccgcggccaaggacatcagcatggcgggtgcgctcggcaccgcgctgatgctgctcgaatgctccggggtgggcgccagcatcgcgctggagcgcattccgcggcccgatggcgtgccgctggagcgatggctgaccgcattccccagctatggcttcctgctggccgtcaatgacgacgatgcgcaggcggtcgaacgccgcttcctcgatcgcggcattgcctgcgcccagatcggcgccatcgacgattcccgtgtcgccacgctcacgcacgccggcgaacgggccacgttgtgggacttccgcgaggcagggttcatcctgccgacgcgcctggccacgccgatcgattccccaacctgagacctgccatgccagttacctatttccgcatccgctggcctgaccagaccgagatggcctgctattccccatcctccatcgtcacggagcactttgccgaaggggcggcgtatccgctggacgagttcgtcgagcgcgcgcgtaccgcgctgggcgccgcttccgagcgggtgcgtgccaggtatggctacgcctgctcgtccgcgatggaccagctccgcatcctggaaatcgccgcgcagcggttccggggccaggacggcgccaccgtccggtttctcggctttggcagctagccgttcttcaaattcctcgccttaaaggatccaacatgtccaacgtcatctacaccaatccggaccaggccgcagaacccaggcactacggcgtcatcattgtcggcggcggccaggccggactatcgatgagctacttcctgaagcaggccggcatcgatcatctcatcatcgagaagcacaccgtcacgcatacctggcgcacgcaacgctgggatgcgttctgcctggtgacgccgaactggcaatgcgcgctgccgggctatccctaccagggtgatgatccgcacggcttcatgaagaaggatgagatcacggcctatctcgatggctttatccggacggtcggcgcaccggtgctcgagcacaccgaggtacggcaagtgaaggcgcgcgctcaggggggatttgccgtggtgacgagccagggtgcattcaccgcagaccaggtggtggtggcctcgggcggttatcacacgccgatcgtgccgcgcatggccgagcgcctgccggcgtcggtccggcagctgcaatcgtccgaatacaggaatcccgagtcgctgcccgagggtgcggtgctcgtggttggctcgggccagtcgggcgcgcagattgcggaagacctgcacctggccggccgcaaggtgtacctggccgtcggcgaggcgccgcgctgcgcgcgcttctatcgcgggcgggacgtcgtggactggctcgcggacatgaaatactacgacctgccggtcaccgagcatccgctgcgcgagggcgttcgcgacaacaccaatcactatgtcaccggccgcgacggcgggcgcgatatcgacctgcgcaggtttgccactgagggcatggagctctacggcttgctcgacgactacctcgaaggccaactgcgttttgcgccggacctgcgtcgcaacctggacgatgccgatgcgacttacaaccgcatcaacgcgagcatcgacaagttcatcgcggagcgaggtatcgaggcgtcgccgccgagcgtctatgagcccgtgtggacgccgccggccgagcgcaccgaacttgatcctcaggcagccggcattggttcgatcatctggtgcatcggcttccggccggacttcagctggctcgaagtgccggtgttcaacggccgcggctatccgggccacgaacgtggcgtgaccgcgcacgccggcctgtacttccttggcctgccctggctgcacacgtggggatcggggcgattctccggcatcgcgcgcgacgccgagtacctggccgccctgatcgccgcaggccggggcgacaccgcgctggccgcctgacatggaagccgtcgtctcgcgccatgtggccggcatgccccagttggcatacaccggcctgtcagagaactggctgctgaagacctgcggcgacctgcactggcgcctgctggccgccggcgccggcctgggggtgccggacttccgcgatgccgagggcaatccggtgtatgcggcgttcaccgcgatccgcgtgcgcgacgccgcgccgcaaacggtcggcgagcacgccgggttcagcatcggttcgcacatcgtgccagcgggtggcgtgaagcacctcagcgaacatgcggtcgacatgcatggggactgccgcgccagcgtgacgatgctgtccaccttcatccgccgcacgcgtgaccgggacaaccgctcggtcgtgcgcaccatgccgaccgtggccgcgcagtgggccggcgccggcccgtcggcacaggcggcggaactgtcgctgctggcacggcgttttcgcggcggggattggggcatgcatctcgggctcgatcaggcccggcatcgcgtctgccacgccgccgagtacctgccgtgcccctgcaacgacttcaatggcgccgacctgctgtacttcgccagcttccaggccatggtcgatcgcgcggaatggcaatggcgccgcgacgcggatccgcccacggtgttcgcgcgggacctgttcttccatggcaacgtcaatgtcggcgagtcgctggagctgatcttctccgcgctgcgcgaggacgaggaaggattgacgcactggtgtgagatccggcgcagccgcgacggcgagaagatcgcagatgtggtcacgcagaagcggtggaggcaacgatgaacgcgaagcgggatgacccggcaggcgcccttgagctgaagccggtctacgggtccggcgacctgactggtcttggccacctgggcggcatgcccggcgaggccccgttcgttcgtggcccctatccctccatgtaccgcggcaggccatggaccatccgccagtacgggggatacggcgacgccgtgacgtcgaacctcgcctatcgcgaggccctgaagcagggcgcgcagggcttgtcggtggccttcgacctgccgacccatcgcggctatgattccgacgatccactggcgcaggccgatgtcggcatggccggcgtggccatcgactcggtcgacgatatgcggcgcctgttcgatggcattgcgttggaccgtgtgtcggtatcgatgaccatgagtggtgcggtgctgccagtactggcagcgttcctggtcgcggccgaggaatcgggcgtcccgttcgaacagctgcgcggcaccatccagaacgacatcctcaaggagttcatggtccggaacacctggatccatgcgccgcagccgtcgctgcgcatcgccaccgacgtggtcgaatggctggccgcgcatgcgccgaagttcaacggcatgtcgatctcgggctatcacttccaggaagcaggcgccgatccggtgctggaactggcactgacactggccaatgccaggacctatgtcggcctgctgcgagagcgcggccttgatgtcgatgcattctgcggcggactgagcttcttcttcggcgtcggcaagccattcttcgtcgagatcgccaagctgcgcgccgcgcggctcctgtggcacgacatcgtgtgcgagctgggcggcaccagcgcgcgcgccaccgccatgcgcatgcattgccagacttcgggctggaccctcgccgcgcagcagccgctcaacaatgtcgcgcgcaccacgatcgaggcgatggccgcgatcttcggtggtacgcagtcgctgcataccaacggctttgacgaggcattggctttgccgggcgcgcaggcctcgcggctggcccgcgatacgcagctgatcctccagcatgagtttggcctgtgcgacgtggcggacccgtgggcgggctcctacctgatcgagtcgctgaccggccgcatggtgacggaggttcgcgcggtgctggcgcacatcgacgctgagggtggcatcctggcagcccttgaatccggctgggtgcagcggcgcatccaccagaatgcgctgcggacgcaggctcggctcgatgcgcgggaagaggtcgtggtgggtgtcaaccgctaccaggagcccgacgacaatggccaggaatgcctggagatcgacggtacccaggtgcgcgtgcaacaggcacgccgcctggacgcgctgcgcagccgccgcgatgacgccgcggccaggcatgcgctggcggcgctgaccgaagcggccaggcgcggcggccgcaacctgctagcctgtgcgatcgatgccatgcgttgccgcgccacggtcggggaatgtacccgggccctgctccaggtctggccgcgccatactgtccgggcgtcctacgacgttgcgctgtacggcacggctcgcgctggcaacacggaatggctggcggcctgcgagtgcgtcagtgcgctgcgcgagcggcttggccgtgcgccccggatactcgtggccaagctcggccaggacggccacgaccgcggtgcgaaagcggtggcggccgggcttgcggatgccgggttcgtcgtcgaactgacgccgctgttccagtcggccgaggcggttgtatctgccgcctgcgatggcgacttcgatgccatcggcatctccacgctgggcggcgcgcatctggatctgctgccggcgctgctacacgccttgcggcagcgtgcgctcgaagtgccggtcttcgtcggcggcattgttccggcagaccacaggcgcttgctgcgccagtgcggcgtgcaggggattttcggaccgggcacgccgatggagatcatcgtgagcaccatcgtggctgcgctcacgttgtcgaggatgcctacggcgtaagcgtgacgtcctcgatcgccacgtcgcccaccagcatgtagccgggcgcatgcgtgatacacagcggcagcagcgcctgcacggccgcggccagaggcgtgccgcctggatggcgatgcttccgcttgctgagatgtccgacaaccgggtcgcgaccttcccgcgtttcgtatttgcaccagaaccttcgccctaccgcgtggcgaacgccagccgcggtggcgcttctggcaccgcgcagcgaacgcgccggtcgcgctccggcagtgtcagctgggtacgtggcggcgcggctcgccgcacgccgaggatttcggctacattggcttgcgggcggagcagcggccgcagcagcgaggcggggcctgtgagcagcggcgtcacgcccgggccgtgcccgctgaccgtgctgtcgccgtgtaccacgacgccgatggtcacgcggtcattggcgtagcgcggcccccgccgcgtatcggcgccgatgatcgccaccatgtcgccgaagcgcaggctgcccagacggtagcgctcacgtgcctgccggtccgacagctggatatcgtaatccccgcgccatgcattgttctttcccagtccggagcccatgacgcgcgccggcaccagatgcgtgaccggcgcatggagctggccatcgcgctccagcaggccccatcgcgccagcaggcgcggcgagcagttgaggacttcgattcgggggtagtcgcggagtcgtaagcccagtccatgcgaaagaacctggatgcggtcgccgatgcaaaggcgcaccagcacctccgtgggaaagtccaccagcacgtggttgacgccgccgtgcttgcccgtcaccacaccagtccggcccgcgcacgctccgttgaccacacgggccggattgccgacgcaggcataggtcagcagggcgctgttgggtccgtcgcgtgggccgacgatctcgcgcccgttgttgtgcagggcgacccccggctcgatatggtcgcccgccaacccgacgcaaggatcgccgatgcgcctattgaccacgatgccgccggtacccggcaggacgcgcggcacgccgtcgtagccaatgcggtagggcgaggcgcgccccacgggatgcgcgatctgcccaaggacggacaccgccacgagttcgtcggcattgattcggggaacggggcgtgcaccgtcgcggccggccggacgggacagggcttgctggacgagcggaatcgggcgggacatgggtgccatctcctatcgcatcctgcgcaccacggtggcggcgatctgcggctgtcccggcgcgcgccggttctcggccgcgacggcgtcgtagatggtgtgcgcgatatggtgcagctccgcatcggtcacgcgtccgctgacctgatagaacaggcgcacgcgctgcggcagcccgggcacggcgctggtccgggactggcgcatatggcgccgcacctggtccatgtcgcgcaccacctgtcgcgcaagatggctcaggcgtagccgtccgttggcgtcgcggtaatcggttgcgtgtagcagcttgctttcgaggcctgccggcaggcgcttgggggcagccggcatcggcgtgagatcgagcaccgagccgcccctgcgcgggccgatgcggagctggttgcgcacatcgaagccgcgcaggcacaggcgttcgaccaggatctgctcggcgcaacggccacgcaggttattgatgacgatgagcgccggacgctgcccgcgcggccgggcctcggcggcggccagatcacggcatgccagatgccgggcgcgcgaggccggcaggcattcgttgcggccgacggcagggtcggcatccccggcgcgtccgcgctcgcgcgtccagtgccgaacggcatcgtcaagcatggcgtcgacgaactggtcgattgctgcgctcatgcttcggctccttgcggggccggtgtgccgatcgccggagtggggcaaaggggataccaccaggcggtggcttgctgccaggggtcggcatgatggccggtcccgaccagcgggccatcgacgcaagcatggtgcggcgacgacgccattacatgcagcgcggccagcctgggcaggcgttcggcgagcccggccactcctgccgctgccagtgcgtcgcgcagcagcgagcgctcggcgccgaacagggattcggaaggcagcgggtccagatgccgcacgtcgacgccgcttcgccacagggcatgcaccggccacggtgcgccgtcaccatcaagcgtggtcagcacgatggcggcatcgagcgtggcggagagtgcgagcgtgtcgagggcgatggcgagcggatcccaccagggggagggcattgggccgagcgccggccttgccccctcgcagcggcgcagcagggcgtcgagcaggacctcgtagcgctcgaccacggcatggtcggcagcgtcgccgagctgggaaccggccacgttgtctccgacccagcgaaacggccacgacgcggcatcggtgcagtcgcgcatcgcgatccacgcaatcagagcgggttcgagcggcctcggcacggcgccgccgctgtccagtgccgcgccgttggccgagaggcctggcagtaccatctcgctcgcatcgatgacctgccagaacgcgcgcgtgagccagggctccagcacccgcgtgagccgcaacgccaggctcggcccccagggcgacccgagcaccagcgcgggatcgaggatgcaggcgagcttgcgttgccgtaccgatacgatcatgtcctcagcatgcatggcggggcgtctccgtgtcagccgcggtcagggatgcgcaaatgtacggcgcgccacggtcaggccgcagcctgcggcacgccgagcacgctgttcagcgcgtgtgtcacgccggggaatcctcggccctcgggcgtcatccggtacgcggcgacccacgcttccgcgtgcgcgcccatgggccgcaccacgctctggaacaggatcggatcggttgcggtcttgaaatcattgtccgcaacaaactgcaggatccgccggccgctttcggccatcttggcccgttgcgagggctcggccaccccgccgagatagcgattcgagacgatctcgaccacatcccacttggtgttggcgtcaaaggccttcttgatgtcgggcgaatccagcagcttgagcacctggatcaggtaatgcccggtttccatcgcgagcgcgaagatattgccgtaggtagaccggtccagcgcatagcgcaggtcgagcccgatgcgctggatggtgccgacgctgccgaagggacgctggtcgatcagctgtccgccccggatgacttcgccgatcagcagatcgcggaagtactggcccatcgccaccatgaagccgaccatctggcgatggaaattgcggttgaccactgcgccggccggggcctgcgcggtgccatagttgaaggcgcgccgataggccaccatgcggtcctgccgggtgtagcgcagtggccgccatttttcgagcagatagagtccgcgcgcgccggggccgcgctggatgcgcatcttccccaggcggaacaagcgcagcagggtctcgaccacctcaaagatcttcatgcgctcgtgctgatagataaagtacagctcggcagccgcatgcaactggctcgggatgattgaatcgtcgaagtcaggctgtacatagggatagccgatcttctcgaagccgactgccccctgaggaccgaggccgagcagatcgaagaagccttcctccccgctgccattgggtttggacaacagttcagagtaacgctgctcgaactgcgaggcgaaggcgtcgcgctggtcgggcggcaggctggccagctgctcctgcagaaaggtctcccacaggcgctgaatggtttcggtggtctggaagttcatgatgcgctccgtcgtcgggggtcaggccttggcagggccgccgtcgggacccgcagggcccgctccgctaccgtcggcgccagtaccttcggtgccgtcgaaggcatcagccgcaccgggagtgagaggggcgggggcagcggcgggcggcacggcggacgtgcccggcgtaaggagtcgccggcgattccgttcccccaactcgtgcgcgatacgatcgatcgagccgtccggatgtggcggaatctgcggggcgtgctcgcgatagtcgcggttgcgccggtgccactcgggcacgcgctgctcgatcatcatcaacgcgccgcgctggtatcccggcagcattccgatattgccaaaggtccccatatgtggcggactgtgatagacgggggcgagcgtcgcatctgcaagcatatccgaggccggaatgcagccggatgtcatctgttcgacgatgggccgcagtgcgcgctcggcctgcagctggagcacaagctcgccatgcatcagccaggcgagcggtgtcggtcctgccggccccgtcagatcgaagtgatcaatggtgtgcttgtcccatacacgccattggggcgcggggatgaccggatcctgcggggcggcgaagctgacccctgccgggatcagcagtgcggccatttccgacagcattgcgcccgtcgggttgtcgggattggtgatgtccttcatcggtgcagcggcatcgagccagacatcggggtaacgcagcgccagcgcaaagatggcgtgggcggcggcacgctgttccggcatgccaaactcttcggtgccgttggcgtagagatcgattgcgcggtcgagatcgtgcaggacacggtcaagcaggacctgcagcttgagcgtatcggggtcgcagtcgcaacgggtgacacagtcgatggtcgaagcaaatctgccgcgcagactgaccagattcatcagacgctgctcggcaaaggtggtgccgctccctccgtaaaggccatacatcagtacgctgggacgcgcaatgcgcaggaggcgcaggccgccggaagcctggaagccgtccacgaacaactgcaaggcgtcctgaaacgccagcagcggtggcgcgtcgcggaccggcaggtgcagcgtcacctgcacgaagcgcgagaaccgcccgagcatgttccatgcggtcgcgccgacccggcgcagcccgtcgctcgagcctcccgcacacagctggatcatttcgtccatcgcacgggaaaggtcggcttcgtggagcagtgcccgcaggtccgactggccatgcgcttcgagactggcgtgcaggccgcgataggcggccaggcctcgcggcatcgtgttctggtccagcgattcctgggccacgcccgacatattgcgcaggcacaccagcacctggtcgcgccgcgcctgcagttcagagtagggcacgcgcagtaatgtgcgcccgccctggaagcctgtattggcgagcgcctcgcccatcaacaccagaagcaccgcagccacttcgtcgaggctctgcccgagattgcgatagctttcgttcagctcggtggacagcgcgcccaccatccgcgccagcctggcatattcgcccaggcgccgccgtgcggcgaaagcccggtcccggctgtaggggtcgagggactggcgtgccgccgcgacgccatcgtcgatggtgagggacagggtctgatgccacccctccagctctggccggatgtccttggtcaggttgctcgcgatcagttgctgcagatcctgctccacatccgcccgggcctgatccagatccagattggtcgcggtcgcctccggcgcagcgatggccgagggccgtggagccgcggtattcaggaacggcagtccctgagcctcgccgccgataccctgcgcgcgcgcgtcggactggtagcggtccagcaatgctctcgcgatctgctgggcgtcgttgggatctccgatcttcagttcgcgccgcagcagggtatcgaaggcgagccgctggctgtttccgatgctcatgggtttgccgtcggagccggacggaaccggttggggaatcgcgggataggccatggtgatcctctgttgcgttgaacggcgtgatgcgtgtgttgtcgtgcgcgcctacgacaccaggtgcaatagcgcaggctgcggctcgtacggcgctgcgcgcgggcgtcgcgaggccatgcgcgcgctcagctggccgatcacgcagtgcgcgaggcgcctcggcgggatgcgcccgtccactatcgcgtagtgcgcggcgctcacgaggtggcggggaggcagtccggtttcacgttcggacgcaagcagccgcgcgccttcgcgaatggccgcctcgtcgtcacgcgagaagggaatgatgtcggccagggcgcgctgggcgaggttgcggcgcgtctggaacgcaatctcgtcgacgacgtccgggacgatgcgcggcacgctcagcatcagcgcggcgggtatgcggtgcccggcggagggctggtacaggttttgccaaacccgtaacaaccgtgcggcgtcgcgcgcgaagccgagccggcgtagcatttcggccagcaggtagacacgcaggtaggcggtgggatgcgcgccgccgggccggtaggtcatggtgcgcggctgggggtgcgcgaggaaatccgccatgccccaggccgccgccgggccaccgagcaggatggccgcgaggtccgcgaagatctccttgtgccagcggccgtagacggtggcgaggaagggatcgcgcgtcttgcccatggtgcgcctgagtacggcctggcggttttccctccagatgccgaggtcggcctgcaggttgtgggcgacttcatgcaggaagaccgattgccacggctggtctcggtcccagggtatgcggatcagcggaaagggattggcctcgccgagcagccgcgacagcgccacgccacggcgcatcgtcgcgggagaatagccgtgctccatgtagcagaccggcttgagcagcgggccatcgaagacgcgtggcgcggcgcgtcgaacggcgcggtagcagtcttcggcgatgacgtcgtgcgcggcgagcgacgggccgaagctcgtgccccgctgcgcgaacacttcgtagaacatgccgaacagccgccgcgcgcggtcaagttcgcgctcgaccagcgccacgtcgatcaacacccgttgcgcaggcctctgctgccagtccggcagcatctgatcgaagcgcgcgcggatgcgttgctcggcctgggccagccgcgcgttggccgtgtcgaaatgttgctgcgaaggcgcatggggcatgtcttgcgggcgcagtccgacaaaggcgttgtcgacccgggccagccgcgacaggcgcgcggacaggccgcgaatcttcgcgctcaggaatcgctgcaggttcatggccggcccccgttccgatcggtgtcactggcgacgattcatgcgccacggacgatgatggtcaccggcccacgcacatgcatgcgacggccgccgcagtgtgggcagccgacgccatggccgccatagttgcgggactgggcgcgcgggccggttgccgcgacacggcgcgctaacggcgctatcgtgcgcgcggcggcctgcgcgccgcggccgcgcggcgtggcccggcgcgccgcaggcaccagcggctgcgacagctggcgcgccgcctggggtcgccgtgccacggcttgcgcggtgcgggtggcggtacgcacagcggcgcgcggcggcagctggcgcgcctgcactgtgcgttgcgtggcgcgcaccgcgcgtgcaaccgcgcgtgccgcgggggcgccgctggtgcgggtggccgttcgcaccgcctgggccacgccgcgcaccgcggcgcgacgcacggcgggcgcggcgcgcgcgaccgaggggagggcgcggcggagcaccatgccggccagcaccggcgcggcggcgtcgatcgcatcctcgtcgagtccatccaccagttcgtcgaaggtctcatactcgtcggcgccgtcggcgagcatgcgcccggccacattggcgatgcgcccgatcaactgcgcttgtggaagaggaatcatgctggcgatcggtcccaccacacgcgcggcctgcccaatgccttgccccacgcggcgcgcgacattgaccgcgccgctcgccatgcgccgcaggcggcggaagaactcgtcggcgtcaccggcttccatggcatcggccacggcgtcctccatgccgtccagttcgtcgtaggcggcctcgtattcgtcgacggagtcgatgccgtccacgtcctcgtaggtatcgccctcgtcctcgccttcgtcatactgggtcgcgccgcctgcgagcacgcggccgacgaagttgtcctcgccttcatcccattcgtcgtagctgtcgttgccctcgtcggattcgtcgtacccgtcgtcgtgcatcaggtccatcgcgctgcctcgagtggggccctcggcggcttcatccatcagctcgtccattacatcggcctcgaatcggtccatggtgtgctccttggtgtgcggctcaagttgattggctcagcggggtgcgaccgtcagcgtcacaggtccgccgaagtggaaggtccggggtcttctcggccggatggtgcgcacgccgcggccgatgcctgtggggcgggccatcggcccagggggagcgggttgcgccaggcgatcgagcatgcggggattggcgacgacgcggcgcgcggcctggggcagcccacggcgcagcgcccgcgcggcctggttcggcggttgctggcgttggcgtgcgacgcgggtggcggcgcgcgccagcggtgccagggcgcgtgtggccccgggtccgcctgcgcgcgccagttcgcgtgccgcgctggcgacgccgcgcacgagttgccgccggcccgcggccgatagttgcgccacatttgacaggccgagtccgcgcgcggcggctcgcgtggcgagcgccaccgctgcgggcagggcctcgtcgatgccgtcgttggcatagagatcgatcatcgcgtccatgccctggctcgcgctggcctgcgaggcgagcagttggctgatctgcgcgagcatgtcctgagtgccgccgccaagggtgccgagggcgcccgcctgccggcgcgcctggcgcgccgcgtggctgacgtccccggcaaggcggccagcggtttgcaggccgcgcgcaaggttcggcgcgcccagcatgcgcgcaagggcggccgccgcgttggcggtgggggaagcagcctgcgccacccggcccacctgtcccgccacgcggcccgcccttcgtgcgacgccctgcatgcgtccggcctggcggcttatcaccccggccgcgcggccgaggccgcccagcaggcggccgagaaattcgtcgtcgtcggcggcgtcgaggccgtcggctacttcttcctcgaaggcgttccatacggccatctggtcgatgtggtcgccgatgtcggtgtcttgcgcggccgccatatcggccgaatctgtctcgtccgtgaaagcatcgtcgcccccgtcctcgtcaaacggggacgcggtccgcgccaagcccgattgcagcgcggcatgatcggcggcgtcgtcggccgtgtcgccgtagtccgtgctactggcgtattcgtccaaactgaggtcttccatcaggtcattgtcgaattggtcgctcatcgcatgcctccacgcggccgtgtgtcatgccgctgtcatggccactctagatgcggcgaggtgcccgccgcatcgcccgatgcctctggcacggcgggattcgcgcgaccggccgggcgcgacaggaccggcgcatcggggtacggcacaacgggcccgcaaggcggggcgtgccgccttgccgtagccggaatggggtagcctgcttgcgctctcgctttttccttgcaaagtcaccggccatatgccaaaacaaagaagtttcgagcggcctgtgtcagggaaaagtgcagcgggggcactgcagcctgactcaggggaacgcagcttgtcagcgcgcacggatacgaatgcggactcgaagccggcagttgagctgtgccgtcatgcgggcatccggcgtgccgttcgctcgtcgtcgtgttgccaggcggaacgacaagaaggaaaaaccatgcttcacagattccgccggggggcgctgctggcaccgtacagcgcattaggggattcgcccacggccgggtacggggcggcggcaatccggtcgggcagttgggggagagaggtctgcgaggtcgaactgggcggccggcgatgtcggttgctgcaggtaggcggcctgcgtgcgccacgcgggggggcgtacggggaaggcgagattacccagttcgagttcgaggggaactattacgccctgatcgctgatccggtggccgtgccggcggccgcgccgctgccggccggcgagccgcgtcccgccgtccccgatgtgcgaagcgtgttgaccgtgcgcgaactgcagatcgtgcaactcgtctgcatgggctatttgactaagcagatcgcgggccggcttcatatcagcgaatttaccgtccgctcgtatctcaagacgatctactgcaaactcggtgtccgatcgcgcgcggcgatggtgttctgctatatgcaggcatgcgctggaggcgcggacggcgcccaaacctgacagcggtccggtatcggctaaccggaaggaacgacacgatttttcaggcagacatcgacgggtgcacgaaagactgcattcacaggaacccgatcgagaaccaaggcaccagtgtcagcagcagcaaagccaccagcagcgccgccatgtgcggccagacccgcggcatggccacgtcaggcgagacccgcccgatggcgcaagccgcgtagaagccgacgccgaacggtggcgcaaacaggcccaggcccatggcgaagatcaccaccatggcgtagtggacttcatgcacgccgacgatctttgcgatcgggaacagaagcgggccgaacagcacgatggccgggatgccttcaagcaggctgccgagcaggacgaatgccagcgccgacaccagcaggaatccggtcttgccgcccggcacggcggacatgatcttcaccaggtcgccggcgaagcccgattgcgtcagcgcccacgccattgtggtggcgcagccgacgatcagcaggatcgcgccggacagcgcagcggtatcgaccagcatcgggtagatgctgcgccagtggaagcgccggtagacgaagatgccggcgagcactgcgtagaagatgccgatggtggacacttcggtcgcggtggccacgccttccactaccgcggtgcggatgatcacgggcaaggccagggccggcagggccaccagcagcgatttcacgatcacggcgcgcgtagggcgtaccaccgtgctcatgtcttccttgcgcgtctggaaccagcctacgcaggccatcatgaccaggcccacggccgcaggcatcaggccgccgatgaagagcgaggtgatcgacacaccggtgaccgatcccaccgtgatcagcacgatgctgggcgggatcgtttcggacatcgcgccggacgccgacaacaatccgatcaggtcaccgtccctggcgccgcgctgcttcatttccgggaacagcgcgggcgcgaccgctgccatgtcggctgcctttgcgccggagatgccggacacgatatacatcgcgccgagcagcacgtactgcaggccgccgcgcacatgcccgatcaggttggcgaggaaactgatcatggcgcgcgccagtccggtcatctcgatcagcgcgcccaggaagacaaagagcggcacggcgagcaggatcaggtgcgacatgccttcctgcatgcggttcgggacgatcgacagcggggtcgtggtggtgaaggccaggtagcacatggtggccaggccgaaggcaaaggcgatcggcacgccaatggcgacgcataccaccagcaccagcaggaagaagatcaccaggttgatgttgccgagttctgccagcaccggggacaaggcccacaagattgccccgattacgcccaccgccacgccgctgacgagaacccgtttacagtcggcctgcgcgaccagccggatgacggccgtcgccagcatcagcagcgcgccggcgagcaccgccgcggagcgatagccctcgctgatctccagcgttggcgacgagacttcgatgtgttcactcaggtgctcgtaggccggccagaccagcatcagcaggaacgccaccaccagccacatgccaaaggcatcgagccacgcgcgcctgcccggcgccaggtccttgatgaaggtggtcagttgcatatgcgcgctgcgctgcagcgcaatgatggcgcccagcatggccagccagaggaacaggatgctggccagttcatcggtccaggggatcggcgcatgcaggacatagcgcgcgaaggcgccaccgcccaggatggcgatctcggcaagcacgatcagcgcggccggaatctccacggcccagcgcatggcgcggccccacacggcaagggcggcgcctggttcctgcggtgcgccagcgaaggtttcggcagtgtgctccatcgtcgtgtctccatgcggcacgcgctgaggcgcggcttctcgttcagtctggtggtatggcgtcaggccaggcggcccgcgtatttctcgagcttggcccaggcttcctcgccgtacttcttcttccactcggtgtagaagcccgcgctttgcagcaactggcggaagggcgcgggatcgggccggttcagcgcgatgccgagcttgcccagttccgcctgcgcatcgacattcagcctggcgatgtcttcgcgctggcgcagcgccgcgctgttgaaatgggtggcgatggtcgcctgcacttccttgggcagcgcctggaatttcctggcgttgccgaagatgaagtggccatcccaggtatgcgcggtaagcgagcagaacttctggacttcgtacagcttggcgctgcggatcagggccagcgggttttcctggccgtccaccacccgcgtctgcagcgcggagtagagctcgccgaacggaatggcggtgggcgcggcgccaagcgccttgaacatcgagatccagagcgggatgccgggaacgcggatcttgaagcccttcaggtccgcaggggtctgaaccggccggctggccgaggtgatattgcggtagccgttgtccaggcacttttcaaacacgtgcaggttgaccttgcccagcgctgcccgcacgtgcgcgccgacgtcgccatccatggccgcccagaccgtggcgtagtccttgaaggcaaaggcgacaccgttgatgccggcggtcggcaccagcgtctgcaggttggtgccggcagtggacatgaaatccatggctccggcgcgggtctgcgagatcatgtcgggctcgctgcccaactggctggcgggatacacctggagatccaccttgccgccggtgtccttgcggatggcctccgcggcttccttgatgcgcagtgtgcccgggtggtccgcaggaaacgccgtgccgtacttgagccggatgccggcgccctgggcaaggccgtggcgtaccggcaatgcgagcgcgagactgcctgcggccagggcgccgaactggcggcgtgtcagggagaaggtcatggtgatgtgtgctcctgtattgaaagatctggcgccttattggcgcggcggcatggacagcaatgccgccgcgccgcggtttgccagtgccgccaggtaagcggcaaggcgggcggcaaggggcgcgggccacggcgtggtgccaaagacggcggcatggccgagcgcctggcgcgcggcatcggcgtcgcagcctgcgctgcgcaggcgatcggccaatgccgcggcgccggggtcgctgatcgcaagtacctcgccgcagtcgctgcggccggttcgcaggtaatgcagccacatcgccagcgcacgctcaaggaatggccgttcgacgcccgcgctgcagctttcgcgcaaggcgggcagccagcgcacggggatcttctgcgtgccatccgtcgcgatctgtgcggtcaggtgggcgagggcggtattctcgaagcgatgcagcagttcgcgacagtagcggtcgacgtcatagcctggcggcgccgcaacagtggcgcgcaagtcttgcattacgccccgcgcgaatgcggcggcagcgggattcgccatgacgtctgcgatgctggaaaatccgccaagctgaccggcataggccattgccgaatgggtgccgttgagcaggcgcagcttcattgcctggtaaggccggacatcggtcgtcagcagcgcgccaccggcttcccatgcgggccgtggtcccgcgaaacggtcttcgatgacccattgcgtgaagggctcgcacacgacggcggcttcgtcgcgcacgccgagcagccggctggccaggtcgagcgatgctgtgctggcggccggcacgatccggtcgaccattgaattgggcagtgcgatctcgtcctcgatgcgccgtggcaggtttggatcggacagttccgcgaactgtgcaagcagccgacgcaaggtgtcgccgttgcccgccatgttgtcgcagcacaccacgctgagcggggcgccgcgcggccggcggcgtatgcccgccgcaaggatgccgagggtgctgcgggggcgctccgggttggccaggtcgtggcggatgttttcatcgccgaggtcgagcccggtcgttgacgggagctggctgtaacccttctcggtcacggtgctggtgacgacgctgaccgccgggtcagcgatggcgtcgattacctgcttcagggcctgtggcgcatacagcgacgcaaccacggcaccgacgatccgtgtgtggctggcatcgccatgacgctcggtgaccgaatagagatggtcctgggcttgcagcgtgttgcccgtggcggggctgcgcaagctgacgccgatgattccccaccgggtatcgccctgcgccagggcggcttcggtgtacagcgcctggtgggcgcggtggaatgcacccagacccagatgcacgatgccccggcccaggccggagcgatcgtagcgaggacgctcgaccccggcacgcaccttgagaagggcttcttgtgagaggcgctgatggcgtgctgccgtggcggaaatgggctgcatatcgatataggatcacatttctctggttactgccatggtagtgcggcggtgttgtgcactgtagtcgcgagtatttggcgaatccatgcgggtttacgccgaacgattgggaaaatggcgacgtgctaccatggcagtgacactcaaataaccgaccccaaatgcgcgcctcccgtatctcgcttgtccgcgaaaattcccaggaagccttcaatgccgaagaggtcctgacccgtgcgctggctggcttccagctggaaaaggaccgctcctacaccgcccaggtccatgcgatgttgcagcgagccatcgtgcgcggcacgctgcccccgcgcatggcgctgtcggaggcggcgatctcccaggcaatcgaggtcagccgcacgccggtacgtgaagcgctggccatgctggcagacgagcagctggtgcagatctaccggcaggtcggcaccatcgttgcgccggtgcgcacttcgctgatcgaggagggacgcttcgtgcgctgcacgctggaatgcgccaatcacgtgcagctggcgctgtccatcacgagcgagcaactggcggagttcggcagcatcgtcgagcgccagcgcgccgccgtcgccggcaaccagaccgacttgttctcggagctggatgagctgatgcaccgcaggctgttcgagtttgcgggccggcacaacgtctgggccatgctcgagcccatcaagcggcatttcgaccgggtgcgctggctgctgctgggccgggtggccgaccacgccagccgcgcgctgcaggagcacgagcagatgctggcgcagatggcggcacgcgatgtcgcgggcctcggggccagcgtcgcttcgcatatcaaccacatcaccgagcacctccaggcgttgcgcaagcaggcgccggagagctatttcactgactgacctcgcgggggaaggcgacttgaagatcgaatcggtacaaaccattgtcacctgtccggggcgcaactttgtcacggtcaaggtgatgacggatgaaggcgtccatggcctgggcgatgccacgctcaacgggcgggaactggcggtccaggcctatctggacgagcacgtgattccatgcctgatcgggcgcgatccccgcaacctcgaggacatctggcaatacctgtatcgcggcgcctactggcgccgcggcccggtcacgatgaccgccatcgcagccatcgacatggccttgtgggatatcaagggcaagctggccggcatgccggtgtaccagttgctgggcggcagaagccggtgggggctgatggtgtatggccatgccaacgggcgcgaccacgccgaggccgtggaggccgtgcagcgtcatgtggagcagggctacaaggccatccgcgtgcagtccggcgtgcccggcctgggcaaggtgtatggcgtgggcaagggtggcgggcattatgagcccgccgagaaaggcctgccgtcggaagagccctgggatacttcgctctacctgcgccatacgcctgaactgttccgcaaggtgcgcgacgccgtgggtttcgggcccctcctgctgcacgacgcccaccatcgcctgacgccgatcgaggccgcgcggctcggcaaggcgctagagcccttcagcctgttctggctggaagacgccacgccggcagagaaccaggaggcgttccggctgatccgccagcacaccaccacgccgctggccgtgggggaagtcttcaactcggtctgggactgcaagacgctgatcagcgagcaactggtcgactacatccgcgccaccatcgtgcacgcgggcggcatcacccatgtgcggcgcatcgcggattttgcggccatgtaccaggtgcgtactgggttccatggggcgaccgacctgtcgccggtgtgcatggcggccgcggtcaacttcgggctgtgggcgcccaacttcggcatccaggaactgatgccgcacagcgaactgactgatgcggtctttccccacaactaccgctttgaagacggctacctggtcatggacgaggtgccgggccttggtgtcgatatcgacgaagcactggccgcaaagtatccctacgaacgtgcctacctgccggttgcgcggctggcggatggcgcgatgtggcactggtagccggagtttccgatgcttagcattgttgtcgaagaacccaacagcatggccgtatgcgagcggccaatgccggagcccgctgccggcgaggtgcgcgtacgcgtgcgctatgccggcatctgcggttccgacctgcatatcttccgcggtcacaatccgttcgtggcgtatccgcgcgtcatcggccacgagttcgtcggcaccatcgatgccgtgggtgccggggtggatgcgtcgcgcatcggccagcgcgtggtggcggatccggtcatcagttgcggacaatgccacgcatgccggatcggccgccagaacgtgtgcagccggctccaggtgatcggggtgcatcgcgacggaggcttcagcgagtacgcctgcgtgccggccggcaatgcctatgtgattccggacggcatgcccgaagccagcgcttcggtgatcgagccgtttgccgtggctgccaatgtcacgcaccgcaccggcgtgcttgcgcaggatgtggcattgatctatggcgcggggccggtcgggctcaacctgatgcaggtactcaagcgcgtccatggcatccgcgccttcatcacggatcacctcgacgagcgcctggcgctggcgcggcaatgcggtgcgggagaggacgaagtcatcaacaccgcgcgcgagcccctcgaacaggcgctggcggcgcgaggcgtggaaggcggtccgacactgatcttcgatgccgtatgccatccggccatcctggaggaggccgtgagcattgcggcaccggccgggcgtatcgggttattgggcttttcaccgacgccatcggcgatcccgcagcaggaactcaccaggaaggaattgacgctgtatgcctcgcggcttaactgcgcgatgttcccgacggtgattgactggatcgcgaaaggcctggtcaatcccgggaaaattgtcacgcaccacgtcgattttcgcgatgttgccggcgcgtttgcactggccgagggcaatccgggcaaatgctgcaaggtgctgcttgactttggccatggtggctgacatggcggatttcgggctcatcgggcttcctcacgcaggtgagttgccgggcgtacggcgcagcttgcataacctggcccagcgctcggccgccaagcggcaggcggatcgtcgcgagctggaacagacgttggcgcggctgacagggcggggtgtctgaagcgtcgacgacccttgcgtaatcagcaggtggcgcttgacgcgcattctctcttcgttcaccttatgtccccggcagggccggcgtcccattgcggcgccaggctttgtgcggcgatcgcgccagcgcagcccgcggccgaacaacaaatggtgaccaaagggagaccatcgcaatgagcaagctactgctcggacccgtgctgtcgtttcgtggcctcggaacggatggctcatggaaggtgacggcgctcatcggcatcgaagatcaagccagggttcctccggtcaccgtggagggccgcaaggccggcaagccggtgatcctgctgcagcatgcgggccacacctatctgcgctacgacttgtcctgcaagctgcgcaagaacgaacggcgggtaccgtacagcatcgaaggtgtcggggaagcgtggcactttaccgtgcccggcaagggctacgcgccgcgcatggcctatgtttcgtgcaacggattctccgacccgagcggcatgcgcaagctggtcaaggctgagaatgcggtttgggcggacttgctgtgcaaccacgacaaggacatccgtccggcaggctatgagctggacaaggagcagctctggcacgaggcgcgtacccatgaccagggcaaccagcgcttccatctgatgctgatgggcggcgaccagatctacttcgattcgatctgggaagacctcaagctgctgaagcgctggatcgggttgacgcgcgaggagcagctgcagtacccggtggatgctgacctcgagaaggaaatcgaggactactatttcaagcactacagcgagcgctggctgcctcatgcaaggtcagggtggggtagcgcagacaagccgctcgatgctgcccaggccatggcacggatccccacggtgatgatgtgggatgaccatgacatcttcgacggctggggttcctatagctccgagatgcagcgcagtccgttgttccagcggctgttcttccatgcgcgccgggccttctgggtgttccagatgcagcatgctgtcgagcagcttcccgacctggtgccgcgcactgacgtcagggtccggtctgacgatccattgttcgaaccggtcaagtggtctcaggtgctgtccagcgacaagcttgcgctgccgttgctggacgagcagccggggttcacgttcgcgcattcggctggcccagtcagcgtgatcgttgccgacctgaggaccgaacgatcccaggaacaggtgcttggacccggtacctggggcgcactgcagcggtggctgtcggggatcgagtcgggcgatgccgccagccccggcggcatcaattgccagcatctgctgctgatgtcttccgtgcccgtggtgcatcccaagctgtcgctggccgaagccttcctggacaactttggccaggatcatgtgctcgacagctgccgatgacctcaaggaccactggacccacgacgaccacgagggcgagaggaagcgcctggtggagaccttgctcaagaccgccagccagaagcagctgcgggtcacgatcatctctggcgatgtccatgtcgcggcctggggtgtcgcctgcaggaaagatgtggggccgaaggacaactgggcgcagatacagcagctgaccagtactgccgtggtgcatccctcgctggtcggggtcatggagcgtctgttcttccatgtgctgaacaacgtcgctcagtcgaagcaggcgcttgatgtcaacttgtccgcggaaatgatgctcttccccggatccaaccggtacgtgatgccggccaggaactggcttgcgatcgagttggaccggggcacggacaacccgaacggctgcaagctgtgggcgacgtggcggtgcgagaccaaggcggcgttcaccaatcacctgctggctaccgatccggtgaacttataatctggatcgagtcagagagtagggcggggcggtgtgctcaggcatgcgtgcccatgcctcgccgattcaaaccccatccgcggaggattcataccatgcgccattgatgccgccgtctgcatgacggccagtctccaccgcccccaagcagggggagttcctggcatccctggaatcccgcatgtcaaatcccaagctgacgctggaaagcgtttcctacgtcctgcccgacggccggacgctcttctctgaactgtccgagcaattcgacgatcgtcccaccggcctggtcgggcgcaacggtatcggcaagtccgtgctggcacgcatcctgggcggggagctggagccctccgcggggcgttgcgtgcggtcgggcagcgtgcattacctgtcccagcaggccgcgcatgccgtgcagacgtcggtggccgggctggctggcgtgcaatcgatgctggatgcgctgcagcgcatcgaggccggcagcgccgcggcgcaagacttcgatgacgtcggcgagcactggaacatgccgcaacggttgcggcaggagctggagcgcaatggcctgggccacctccaggcgcacaccccggcgagcaccctgagcggcggcgaagccatgcgcgtggcactgatcggtgcgttgctgtcggatgccgatttcctgatcctcgacgaacccagcaatcatctggaccggccgaaccggctggcgctgatcgcgcaactgcaacgctggcagcgcggcctgctggtggtcagccatgaccggcagttgcttgagggcatggcgcgcatcgtcgagctgtcgtcgctcggactgcgcagttatggcggcggctattcgttctatgcgcaatgcaaggcgcaggagcgcgagaacgccttgcagcagctggatcagcgcaagctcgaacgcaagcgggaagagcagtcgctgcgtgcgcagcgtgagcgccaggagcggcggcaggcccgtggcaaccggcaggcgcgcgatgccaaccaggccagcatcctgctgggccggcagaaggagcgcagccaggcctcggcgggcaggctgcgcctgcagcaggccgccacgcgcgaagcgctcgatgcgcgcgtgcgcgacgccgcgcaacaggtggaggacgatgccgcgatcgtattgctcgcgttgcctgtcagtcaggccgcgcaacgccgcgtggctgaactggacgaggtcgacctgccgttcgtgccggccgccacgcgccgcatcagcctgatgctgacgggccagcagcgcgtgggcgtcgtcggccccaatggctgcggcaaatccaccttgctcaagctgctggccggccagttgcagccgcttgccggccgctgcgcggtgcatgccgagcgcgcctatctcgaccagcaactggccggcctgctgccgcagcgctcaaccatcgaacagatgctggccgccaaccacaccgccggggaggcggcattgcgcacgcggctggcgctgctggatctcgatgcgcagaaggccaccgcgcccagcggcctgctcagcggcggcgagcgcctgaaggccgcgctggcttgtaccttgtatgccgatccgccggcacagctgctgttgttcgatgaacccagcaaccacctggacctgccgtccgtgcaggcggtggagacgatgctgcgcggctatcagggcgcattggtggtggtgtcccacgacgatgtgttcatgggcagcctggggctgacccatcgcctggcggcaacgccggacgggtggaagctggaaccctggtaggcggtttatttatacccggatgatattgacatcgtattttatccgggtaatattcggaaatcgtctcccaggggcatccgcatgaccaacgcaacgcttcacagctacaccaccttcgacggccaccggcgtatcgccacgggcccgctgcaagccaatgcgctggcgctcaagcgtgcgctggaagccggcgcgggcggacccgtgctggttttcgacgacggcaccgggcgctcgatcgacctggatacgagcgggacggaggccgccgtacttgagcgcacggcagagcgcgccgcgcagctcgaagccgtgcggcagcccgccggcgacaacgacgaagcagcggacgtggccgagccccggggccgcgggcgcccgaagcttggcgtggtgtcgcgcgaggtgacgctgctgccgcgccattggcaatggctggccgcccagccaggcggggcatcggtggccctgcgcaagctggtcgagcaggcgcgccgggaccacgcggacaaggaccgcagccgccgcgccagcgaacgggcctaccacttcatggtggcgatggcgggagatttgcccggcttcgaggaagccacgcgggccttgttcgcgggcgatgtggcgggctttgcgcagcggctcgaggcatggccggcggatatccgcgaacacgcgatgcgccttgcggacagcaacgcctgaacggctccgcgggcctggtcagatgccgcccagcaggtcatgcgcatccacgatcgcataggcgatctcgggatgctcttccatgctgcggcggatggcggctgggatcgactggcggatcttgcggcacaggccgggctgctcctgcacctggatgctgatgccgcgcaccgtgcgcacgccgcgcgcgctgggggtaatggtgagcacgatgcccagctgggtctgcatcaggctttccatgcgctgcaattcagccaggctggtcaggcgctcaagccgttcgaccagccgcttttcttcggcccgggtgagccgcagcacgcgcaggtcggcgttggggtcactcagcaaggcttcgcgcccgcagatacaggcgccgggcgggcattccgtgcgaagagggaacggcgcgttcatgtggggcgcggccacaaggccgcaagatagcggggacgatgaccggatatgttaattcaggttgccggtcgccggttgcccgttgcgggcacgccatctttcccgcaggccctcaggtcttccctctggcaatgtctggttgcgcgggcatggttcagtccagctgctcgatatgggccgacgtaatcggggcacgccacttgtcggtctcggcatcgatcagctgccggagctgcgcgggcgagccgccggcaggctcggcgcccagcgcggccaggcccttgcgcacgtccggcgcctgcagcgcagcttgcagcgcggcgttgatcctgtcgatcaccggcgccggcgtgccgcgcggcgcgaccacgccgccccaggccacggtctcgtagcccttcagcccggactcgtcgagcgtcggcacctcgggcagcagcgcaaggcgtttcaggctgctgacggccagcggccgcaccttgccgccgcggatcagcggcatggcctcggaggtattgctgaacatgaagtcgagccggccgcccatcaggtcctgcagcgcggcggggccgccgttgtacgggataaaggcgacatcagtggtgccggacgcatgctgcatgtgtcgcagcccgcggtcaaccgggtgctggcgctgaccgaaagccggctcggctaccccttgttcgagcgcgcgcggcaagctgttgccgacgccggaagggcggcgcctgtttgccgaggtcgagcaggtctatagcggcgtacagcgcgtcaacgacctggctgcggcgtgcccacgcgcgtcgactaccgcagcgtcaccttcgacgaactggtcggcattttcctgagcggtcgggccgatgtcggcgtgtcgatggtgccggcggggcatccgacgctgtcgtccacgctgctcgggcgccagccgatgctgtgcgtgttgccgccggaccatccgctcgcgggccgcgaggtggtgacgccggaggatgttgccggcagcgcgtggatcggctatccgcccgacacgccgctgggccgtgcgctggccggcttcttcggcgacagcgacagcggcgcccccgccatcgaggtgcattcgccggtcacggcatgcgcctttgtgcagcagggcctggggctggcgctggtggatgcgtggagcgtgacgccagccatgcgcgcggcgctggcggtgcggccggtgttgcccgcggtcggcctggaaatctgcgcgacccattccggcctggcgccgctgccattggcggggcgccgcttcctggcctcgatcggtaaagtgctacgcgacatccagccgcctgccgcgtgcgcgcaggggtaatccggcagcaaatgccgatccggtctatgctcgcggcagcggtgcggcccgacggcccccgaccacaggaatttccaaccaaggcctgcacaggagaccccatggcactctcgatgtacgaagtctcgattcccttgttcatccgcgcgctcggcaatctcgccgcgatcctggacaagggcgcggcccacgcccaggcgcagggcatggacccggccgacctgatccagacccgcctgatcgccgacatggatgcgctgccggcacaggtgcagcgcgccagcgacgccgccaagggctgcgccgcgcggctggcaggcatcgaggtgccttcgttcgccgataccgaaaccacctttgccgaactgcgggaccgcatcgcccgcaccatcgggttcctggagcaggtcacgcctgagcagctggaaggcagcgagcagcgcgcgatcgagctgaagctgcgccaggggccgatgacattcgacggcaagtcctacctgctgggttttgcgctgcccaacttctattttcacgtgaccacggcctatgacatcctgcgccacaagggcgtgcagattggcaagcgcgactacctggggctgaagtaagaagccgagcggggccagtaggaaaaagccgggcgcggatcccggctttttcattgtcgaacagcagcttgggcggcagccgccggtcagcgcggtcagcgcggtcagcaccggggcgccgatggcggccctttgcagcaaaaccgggtgatctgcaggagatatttgccgcgcgcctggccggcggccgggaccgcatcccgccagcctctaagcggaaaccctgacccctctggtatacttgcattacgtccggacaggccggacgcagcctgcgacaggccacaggcggttcctccggcagtgcccggagccatgcacggaaaacccggtgcacaccgcccgcgctgccagccatgcggcgccgatccgggagcccgagcccagatccgtgatacttgttatccggcctttgcccaatacctgttgaaaccccggccagcccaagggcggccgaatgcccgttaacggtccccaaacggtcccagagagaccccccacgcatgacttacgccgtcaaggaaatcttctatacgctgcagggcgaaggcgccaacgccggccgcgccgcggtgttctgccgctttgccggctgcaacctgtggagcggccgcgaagaagaccgcgccagcgcggtgtgccagttctgcgatacggatttcgtcggcaccgatggcacgcgcggcggcaagtaccgcacggccgaggaactggccgcagtggtcgcgtcggaatggccgcagggcgccggcggccagccgctggtggtctgcaccgggggcgagccgctgctgcaactggacgcgccgctgatcgacgcgctgcatgcgcagggcttcgagattgcgatcgaaaccaacggcaccatcgccgtgccgccgggcatcgactgggtctgcgtcagccccaagatgggctcggaactggtggtcacgcgtggtgacgagctcaaagtcgtgatcccgcaggagggccaggactttgccgcatacgagcagcttgatttccgccatttcctggtgcaggccatggatggcccgctggcgagggaaaataccgccgccgcggtggcgttctgccagcgccatccgcgctggcggctgtcgctgcagactcacaagctgctcggcatccgctgagcggcgcggcatccacggtatcgacaggtcgcccaacgggcggcaaaacgtacacaatacaggcttcggacgcgcgcgcagtgtccgtcccaacgcaggcggccggcaccggcgccggtacacatgagcaaacaagtttccattacccgccggctggagttcgactccggccaccgcatcccgaaccactgcggccagtgccgcaatatccacggacaccgctaccggctggacctgacgctgtcgggcgaggtcctgcaccgcgagggcgcgtcggatgacggcatgatcctggacttcggcgacatcaaggcgctcgccaacgagcacctggtcaacaagtgggaccatgccttcctgatctaccgtggtgacaccgcgctgctgaacttcctgcaatcgatggaagggcacaagaccgtggtgctggacgcgatcccgacggtcgagaacctggcccaggttgccttcgacatcctggcgccggtgttcaaggactgcttcggccaccacctgcagctgaccaggctggtgctgttcgaaacgcccaactgctgggcggaagtgagcgcgcccgcggtgctgccggcgcaggactgagcggggacgatgccagagacgccaccgctgccgttgcgcgcgctgcgcgccctgcctgaagacccggccgaggctgccgagcgcgacgcgcgttacatgcgcgccgcgctggaagaagcccgcctggccgaagccgctggcgaagtgccggtgggcgcggtggtggtctggaacgacaccatcatcgcgcgcggccacaacctgccgatccgctcggtggacccgtccgcccatgccgagatgcaggcgctgcgcgccgccgctcaggtgatcggcaactaccgcatgcccgagtgcgagctgtacgtgacgctggaaccgtgcgtcatgtgcagcggcgcgatcctgcacgcgcggctgcgccacgtggtgttcggtgcagccgaccccaagaccggcgccgccggcagcgtgctcaacctgttcgagcaggcgcagctcaaccaccagaccaccattgccggcggggtgctggccgacacctgcggccagatgctgaaggatttcttcggcgcgcgccgccgggcgcagaaagccgcgcagaaggccgcacagcaggacgccgccgcgcctgtcaccgatcccgacaagaacaacgacaccgaagcatgagcacgccgaacagcaggccgccgcataccgaagtccgactgatcgcctcgtccgggtatccgcacgacgtcgccattgccgcgcgcggctgtgcctggctcaagcatcatggctaccacatgaccaaccccgacgtgctggcgcggcgctacctgcgctttggcggcacggatgcagagcggctggccgacctccatgccatcggcactggcgcgccgcacgagctgacgctggcggtgcgcggcggctatggcatcgcgcggctgctggcgcaagtcgactttgcccgcatcgccgagcaggccagcgccagcggcacgcccatcgtcggccacagcgacttcaccgcgttccagctggcctgcctggcggcgacgggtgccgtcacctttgcggggccgatgctgctggcggattttggtgccgaggtggtggatcccttcatgtgggagcatttcgaaggcatcctgcgcaacccggcgtacagcgtcgatgtcgcggcgccgcaatcgggcggacaaccgttctcaggcagcgtggaaggcacgctctggggcggcaacctggccatgctgtgcagcctgctgggcacgcctttcatgccgcaggtggagggcggggtgctgttcctggaagacatcaacgagccaccgtaccgggtagagcgcatgctgatccagctgcagcaggccggcgtgctgggcgcgcagcgcgccatcgtgctgggcgatttctccaattaccgcgtcaccgactacgacaacggctacgacatggacgcagtggtggcctacctgcgcgaccagttgccggtgccggtgctgaccgggctgccgttcggccactgcgcgcgcaagctgacgctgccggtcggcgcccaggtgcggctggccgcacgtgcggatggcttcagcatggcgttttccggctatccggtgctgccgccactggcctgaccggccgcatcgtccgatgccgcgcatccgggtgcaaggaatgcgtccggatgatagaatgtgcggttatttcctgacttcctgccgggttctcgcatgaaccgggcgcggcccgtgccgcatcgccagccatggccgccggatgactccgggccagcgcgatgcatctccggcaaggcccgtccctgagcggcatggggtgcgcctcgtgtgcaaaaccggcaagccgcggccagcgccgcggcgccacaatctccagacaaggttcaagacgtgctttctaccgcaaacatcaccatgcagttcggccccaagccgttgttcgagaatatctcggtcaaattcggcgagggcaaccgctacggcctgatcggcgcgaacggttgcggcaagtccaccttcatgaagatcctgggcggcgacctggaaccgtcgtcgggcaacgtcatgctggagccgggcgtgcgtctgggcaagctgcgccaggaccagttcgcctatgaagacatgcgcgtgctggacgtggtgatgatgggccacaccgagatgtgggccgccgcgcaggagcgcgacgccatctacgccaacccggaagcgaccgacgaagactacatgaaggccgccgagctggaggccaagtacgccgaatacgacggctacaccgccgaggcccgtgccggcgaactgctgctgggcgtgggcatccccaccagccagcaccagggcacgatgagcgacgtcgcccccggctggaagctgcgcgtgctgctggcgcaggcactgttctcgaacccggacgtgctgctgctggacgagccgaccaacaacctggacatcaacacgatccgctggctggagaccgtgctcaacgagcgcaactccaccatgatcatcatttcccacgatcgccacttcctgaactcggtctgcacccacatggccgacatggactacggcacgctcaaggtctacccgggcaactacgacgactacatggaagcgtcgatgcaggcccgcgagcgccaggttgccgccaacgcgcgcgccaaggagcgcatcagcgagctgcaggacttcgtgcgccgcttctcggccaacaagtccaaggcccgccaggccacctcgcgcgccaagcagatcgagaagatcaaggtcgacgacatcaagccgtcgtcgcgccagaacccgttcatccgcttcgagttcgagaagaagctgcacaacctggccgtggaagtggagaacatcaccaagacctacgaccgcaagatcatcgacggcctgtcgctggcgattcaggccggcgagcgcgtggcgatcatcggcgagaacggcgcgggcaagaccacgctgctgcgcagcctgctcaacggcgcggtgcagaccggcgtgcagcgcggcgtggaagtggaccgcggcacggtcaagtgggccgagaacgccaacgtcggctacatgccgcaggatacctacgaggaattcccggacaaccgcgacgtgatggactggatgagccagtggacgcaggccggcgacgacgagacctcgctgcgcggcacgctgggccgcctgctgttctcggccgacgacatcaggaagtcggtcaaggtgctgtccggcggcgagaagggccgcatgatctggggcaagctgatgctgggccgccacaacgtgctggccatggacgagccgaccaaccacatggacatggagtcgatcgaatcgctgcagatcgcgctggacaagttcacgggcacgctgatcttcgtttcgcacgaccgcgagctgatcagcgggctggcgacgcgcgtgatcgaagtgcgcaccgacggcacgctgacggactacctgggtacgtatgacgagtacctgcagtcgcagggtatcgacggctgagcgtcgggacgttgacgatgagagaaggccgcctccgggcggcctttttcattggtgcgccggaatctcagccggcggcgatgcgatctgtgatctggtcgagctggctcgtgatggcacgcgcggtgatgtcgcccttggccttgagcagcgccgcatgcagcggttcgcgcagcgccagcagcgcgggcaggtcggtggccctttcgaccttcacctgcagcatgtagccgcgcaggccgaggtgctgcccgatcacgtcggtatagaagtgatacaggctctcgaaggccgcgatgtcggcgggcgaaggggccgcggtatcggtcggttgcggcgtctcgggcacctcgggggcgcgtgcgtgccgcattgcatacacggagaacatattggtgtcggcggcaggcgtgacccgcgccggtgcctgtgccggtgccaccgcagcgggcggccgtgccggctccgggacggcttcgaccagcccttgtgccaccagtgtgtcgatggcctcgggtgccacccccatgccggccacctgcgccagcaattcctgcccgcggcgctcgccgttgaccatcagcagcagcgcgcgcagcttgtggtcaagcttgcgtgcacgcgtccggatctcgtcctgtcccgcatccgtcttgcggtagatcggatcgaccatgtctcaccccttgttatgtccgaccgcctttggctagagtccctgtcaggtggtgcggccgattatcgccaccttcttgcccggagcggtatgcgcggcttcccgcggcgcaaaaacatagtcccgaatccgctctacaatgtgcgtgcaccataaaagtaacaaaaaattgcaatcgccaattcaccaaaccgagaactgtggccatgcaacaacgagacaaactctttattaacggcaagtgggtcgctccacacggcaacggcacgatcgacgtcatccattccgccaccgaggcggtgatgggcaccatccccgaaggctcggcgcgcgacgccgaggatgccatccaggcggcccgcgcggccttcgacagctggtcggccacgccgccggcggtgcgtgccggctatatcgccaagatcgccgaaggcctgaaggcgcgcagcgaagagctggcccagctgatcgccggcgaagtcggcatgccgatcaagctggcgcgcgcgatccaggtgggcgggccggtctacaactggggccaggccgccaagctgctggacggtttccgcttcgaggaagaggtcggcaactccctggtggtgcgcgagcccgtgggcgtggtgggtgccatcaccccgtggaactacccgctcaaccagatcacgctcaaagtggcgccggccctggccgccggctgcaccgtcgtgctcaagccctccgaggtggcgccgctcaatgccttcgtgctggccgaggtgatcgaggccgccggcctgccgccgggcgtgttcaacctggtgaccggctatggcccggtggtgggcgaggtgctggccagccacccggaagtcgacatggtgtcgttcacgggttcgacccgcgccggcaagcgcgtgttggaactggcctcgcagaccgtcaagcgcgtggcgctggagctgggcggcaagtccgcttcggtgatcctggacgacgccgacttgccgtcggcggtaaagggcaccatcaatgcctgcttcctgaattccggccagacctgttcggcgcatacccgcatgctggtgccgcgggcccgttacgatgaagtgaaggcgatcgcgcagaaggtggtcgagggctttaccgtgggcgatccgctgcaggaagccagcaagctgggaccgctgatctccgcggtgcagaaggaccgcgtgaccggctatatccgccggggcctggaagagggtgccgagctggtagctggcggtccggacaccccggaagggctggacaagggcttcttcgtcaagccgaccgtgctcggcaacgtggagccgcgtgccaccgtggcgcaggaagagatcttcgggccggtgctgtcgatcatctgctatgacaccgaggaagacgcggtgcgcatcgccaatgacagcatctatggcctgggcggcggggtctggtccggtgacgaggcacgcgcgatccgcgtggcgcgccgcatccgcaccgggcaggtcgatatcaacggcggcccgttcaatatgcaggcgccgtttggcggctacaagcagtccggcaacggacgcgaagcgggcaagtacggcctggaggaattcctggagtacaagtcgctgcagctgaagaagccggcggcctgatgcggcgctgagcggcgttgatgcaatatgggaaatgcccggctggcccgggcattttttcgtgcggataatgtgcggaagacacgcacaacataacgagagtcattgggggagcaacgatgcgctggtttggtcggctgaccaggtttgtggcggggctgctgatgctggcggtggccggcgctgccgcggccctggtctggtatcgccatgcggcgcagccgcctgcatccggccaggaagcgctggcgggtttgcgcggccaggtcacggtcgtgcgcgacggccatggcgtgccgcatatccgcgccgccagcaaggcggacgcctggttcgcgctgggctacgtccatgcacaggaccggctgtggcagatgcagatgaacaagcgcgtcgtggcaggccggcttgcggagatcctgggaccgtccgcgctcgataccgacaagttcctgcgcacgctgggcgtgcgccgcaatgccgaggccatcctggcgcaggcctcgcccgagacccgtgccgcgctgcaggcctatgccgacggcgtcaatgcctggatcgaccatcgcaagggcccgctgccgcctgaattcctgctgttgcgcgcgcagcccgagcgctgggagccggccgatacgctgggctggcagaccatgatggcctgggacctgggcggcaactggacccaggaaaccctgcgcatgcggctggcgcaagtgctgccggtggcccgcatcagcgagttgctggcgccgtatccgggcgagcagccggtgcgcaccatggattacggccatctgtaccagcaactggcaccgctggcgaatgccatggccagcgtcggcgacaaggcgccgccgggttatgtcgagggcatgggctcgaacaactgggtggtgtcgggcgcgcatacgcaatcgggcaagccgatgctggccaatgacccgcacctggggctgcaggcgcccgcgctgtggtatttcgccaggatgacggcgcccggcctggacgtgaccggcgccacgctgcccggcatgccgctggtggtgctggggcacaacgaccgcatcgcctgggggctgaccaataccgcgcccgacgtgcaggacctgtatatcgaacggctgcgccccggcaacgacacccagtatcagaccccggacggctgggccgcattcgagacccgcaccgagaccatccgcgtcaagggcgccccggacgtggtgctgaaggtccgcgccacgcgccacggcccggtgatttccgatgtggccgagccgctttcggctgccgcaggaccgctgggcgcacagtatgtggtggccttccagtggaccgcgctgcgcccggacgaccgcaccttccaggcggggctgcgcatgaacgaggcgcgcgactgggccggcttcacggcggcgctgcgcgacttccattcgccgcagcagaacattgtctatgccgatgtcgacggcaatatcggcttctatgcacccggacgcgtgccgctgcgccgggccgacaacgacctcaaggggctggcgccggcgcccggctgggatgcgcgctacgactggaccggctttattccgttcgaggcactgccgcaccgctacaacccggccgacggcgtgatcgtgacggccaaccagcgcatcgtcgcaccggactacccgtacttcatcaccagcgaatggaccgtgccgtatcgctttgaccggatcaaggcgctgctggcggccacgcccaggcacagcttcgacagctttgcggcaatccagaaagacgtggtctcgctggccgtgcgcgatgccttgccgctgctgctggccgcgcccgtcagccgcgatgcggcgcggcccgagcgcgaacgcgccttgctggaggcgctgcgcaagtgggacggaaacatggacccggggcgcgccgagccgctggtcgtcaccgcctggctgcgcgagctgtcgcggcggctgttcgaagagaaggcgggcgaggcgatctttgtccgcctgtgggaccagcgtaacgtgcagcagcccatgctcaacatcctgcgcgatccgcgcacgctgggcgcgttctggtgcgaccggcagcatacgcgcgcggcagagacctgcgacgacgccatcgcggacgcctggacccgggccatggcggacctgtcgcgccgctacggcgacgacgccgcccgctggcgctggggcgaggcgcacacggcccgctccgagcacaagcccttcggcaaggtggcgtacctgtcgccgctgttcaacctgcgcgtgccgaccggcggcgatacctatacggtcaatgtcggccgccacaacctgcgcgacgacaaggcgccgttcgagaacacccacgcggccagcgtgcgtgcgctatatgacctggcggacctggaggcgtcgcggttcatggactccaccgggcagtcaggcaacgcgctgttgccgcgctaccgcgactgggccggcaaatgggccgcggtcgagtacgtgacgatcccgcccgtgccatcgctgccgcagcaggatgcgccagatgcgctgatcctggtgccggctgcgaccaaatagcgcagattacgacatgccgtgctgagaatgctcgcaaatacgcgagatccagccatggtcttcgcggggcgcagcaattgacgctaccatgggaacccctttcgaccggcaggagtccccgatggcaacgcgtaccacccatgtgatccagcacgtcgcattcgagcatgcgggcgtgatcggcaatgccttgcgcgcgcgcgggcacgcgttgcaggtgttccaggccggcgtcgatgacctggcacccatcgcggacaatccggccgacctgctgctgatcctgggcggccccatcggtgtctatgaaaccgatgcctatccctggctggaggccgagatcgctctgatccgccaacgcctggcggctggcggcaagatgatcggggtttgcctgggcgcgcagctgatcgcgcgtgctgccggcgcgcgcgtctacgcgggcacgcgcgagatcggctgggcgccgattgcgcctacgccagcggggcaggattccgcgctggcagaactggctgccgcccactgggaggtgctgcactggcatggcgataccttcgaccttccgcccggcgcgcaactgctggcgtccactgccgcggtacagaaccaggcctatgccatcggcaaccaggtgctggcgctgcaattccaccccgaggtcatgccgcgcgatatcgaggcctggctgatcggccataccgtcgagctggccaaggccggcatcgatccgcgcaccatccgcgcgcgtactgcggaagtcggtgccacggtggcggccgcgggcgagcgcatgttcgcgcgctggctggaggaagccgggctatgagccagccggcattgcccgtgcgcgcggcgatcggcgccgtattgacggggcaggtacgcccgttcgggccaaagggcgtgcccagcggcatcgccaagaccgcggctggcgagcggattcgcgtgaccgcgcttggactcgaaggcgacgggcagggcgatccgcgccatcacggtggtccggaaaaggcgctgcaccactacgccttcgatcattacccggcgtggcgcgaggaactggctgcgcagggcgcgcaaggcaacggtgtgctcgacgttgcgggggccttcggcgagaacctgagcaccaccgggctgaccgaggcctccgtctgcatcggcgaccgcttccgcctgggcacggcgctggtggaggtgtcgcaggcacgacagccgtgctggaagctcaatcatcgattcggctatgcaggcatgtcgcgcgccgtgcagcaaagcctgcgcactggctggtactaccgtgtactggagactggcgacgtggcggcgggcgatacgctggaactggtggcgcgcccctgtccgcgatggtcgctgcagcgcctgctgcaggtactgtatgtcgaccggctggactatgccgcgctcgcggaaatgtcagagctggcaccgctggccgagaactggcgcaagcttgcgcggcagcgcgtggagcggcgcgaaatcgaagatatggagcggcggctggcgggcggctgagcgccgccgcgtcagccctggcggaaccgcttccccgtgccttcgcgcgtaatgcgctcccagaccacctgcttttcctcttcgctgaagaacacccagttgctgacctcggccgcggtgcggccgcagccctggcagatctcgtcgaacagcgtcgagcaaatgccgatgcaggggctgtccgggcgctcggacagcgtggaatccgtggtgccgtgatccggttcggggcggggcggggcggattctgagggcgacggcatggtggcgggagggattggggtgaaacggccagccattatatcgggtacgaatgacaggcagtcggaatgccgggctgggccggcgaggattacgtctgacgtaattgagccgtgtagaccatgcgcttacgctgcaggcacgacgtaagccgttcacaggagcccaaatgtcacaagcccttgccaccttgccccgccaacacgatcgccacgctgcggtcgacccccgcatgcgcattatggtagacaacgtcctgatcggctccccggtggcgcgcgccctcggcgtgcggctggccagcctggctcccgatcatgtcgagctggagatgccattcctgccgaccaacgtgacccacggcagcatcgtccatggcggtgtcattgccacgctgatcgatattgccggcgccgcggcggcagcttctggcggcagtgccgacgatgtgaagggcggggcgaccagttcgctttctatccagtacctggccccggcaaagggtacggcgctgcgcgcggtggcgatggtggtgcggcgtgggcgccggcaggtggtcaccgacgtgtcggtctatgcggaagcgccggacgagggcgtactggtggccaaggcgttgatgagcagtgccatgttctgaatccggagcggacgcatcgggcgcccgttttttcaaatttataaaacgcaattaaccgccgtattttcaccttcacacccaggcgcgccagtacactggcgcgacctgcttccactgcaaaggggcagcttcgtggaggaaagcgatgcggcgtgggcctgaaactgcgcagcagggcggggcgtccccggcacctgccgcatccgagacgctcccggcaagccccgtatcttcggggtcgcgtatcgctgtctacggtgcgattgccgccaacgtggcgatcgctgccaccaagtttgtcgtcgccgccgtgaccggcagctcggccatgctgtccgaggccatccattccaccgtcgacaccggcaatgagctgttgctgctggttggcatggcgcgcagccgccggccggccgatgccatgcacccgttcgggtacggcaaggagctgtatttctggagcctgatggtcgcggtgctgcttctgacgcatcgccaccgctaccgttgccaacggcgccgcgggcgccatcgaccggatcgagcgccgcatccgggcgcggtttcctcaggtcagccggatctttatcgaagcccggctgatgaccaagggcacgcgtgcggcggcctgaatgccaccaccgcgcacctggttgcggcagattacgcagccgcgcgcagcttgatcttcggaaagtcgaccggcaccgcgaaggcaacgttcacgtagttggtgaacaggttcagcgccacatgcgccaggatctcgacgatctgttcgtcgttgaagccggcctcgcgcaattgcgccacatccgtatcgctgacctggccgcgctggttgaccagcttgagcgcgaacgacagcgctgcggcggtccgtgcatcctgcgcccggccagcctgcgcctcggacatttcctgggcggtggcaccggccttctggcccagcgcggtgtgggcggcgagacagtattcacactggtttcgatcggccacggccacggcgatcttctcgcccagggccgcatccagcacaccgccgccgagcgcaccgaacgcgcgccacatgctgcgcaacgcagcgggcgaattggcgacagcacggaacatgttcggggcgacgccaaaggcaccgtggatctcggccagcagggcctggctgtcgcccgtggcagtggcgggattgacgaggggaacgcgggacatggtggactccttggtacaggttgaaaggacaaggcagttgcgatcgccttgactgcagtatgggtaaccatcgagtaccattgggtgcgtaaagtcctacgtacataccaattcgtccagaccatgcctgaacccatcgaccggctttccgcgctgctggagcggtttcgcgcgcgtgcgcacctgttccaccagggaccgctgtgcgggctgacccagttcgccgcgcagccgggccgcggcttcctgcatgtcctgcgccgcggcgaactggagctgcggcacccgccgggctcgggcctgccgggcagcctgcgctttgacgagcccacgctgctgttctacccgcgcccggtccaccacatgttccacaacccgccgcaggaaggctcggatttcacctgtgcggcgctggacttcgacggtggtgcgcgcaacccggtagtgcgcgcgctgccgccgctgatcgccttgccgctggcgcacgtggccggcctggagcagtcgctggcgctgctgtttgccgaggccggccaggtgcgctgcggccaccgcctgctggccgaccggctgttcgaggtggtgctgatccagctgctgcgctggctgatcgaccaccaccaggaggccggcatccaggcgggcctgattgccggcctgtccgacccgcgcctggcacgcgcgctggtggcgctgcacgaggcgccgggcgagccgtgggacctgccgcgcatggcggcgcgcgcgggcatgtcgcgcagcgcctttgccgcgaccttccggcttgtcgtggggcagccgccggccgactacctgaccgactggcgcctgacactggcccaggcgcagttgcgcctgggccgaccggtgaaatccgtggcgctggagctgggctatgccaatgcgtccgcgctgtcgcgcgcgtttacggcacggctgggccaatcgccaaggcaatggctggaacgggaagaagagggaaaggaaggggagacggccgggaaattgctgccggccgatgcagccgccggtttgctcccctctcccgcgcgcgggagaggggctgggggagagggcgggagcgtctagcggcgataccgcctgctccacgagctcatcagtacttccagaagacctgctgcagcgccttggcgtcgttggtctgcgtcagcgccagcgccatcaggatgcgtgccttctgcggcagctggtcgtcggtgacgatccagtcgtacttgtcatccggctgctctgcgttgcgcaccaccacgccgctgccggtgcgcgaggcgcgcacgatctgcacgcccttggcgcgcgcggccttgagcgactccaccatgtagtcgccgacgctgccgttgccggtggccgcgtagatgatggccttggcaccgctcttcaccgcggcgtcgaccgcggctggattggcgttgccgtaggcgtagagcactgccacctcaggcagcttgtcgatcttgtcgatgtcccactgcgtctgcagcgtgtgcggacgcgccggcaggcggtagaacagcgtgcggccttcgaccacgtagcccagcgggccgaacggcgagcggaaggtctcggtcttgaaggtgttgctcttggtgacgtcgcggccggtgtggatctcgtcgttcagcacggccagcgtgcccttgcccttggaggcagggttggaggcgaccagcacggcgtcgtacaggttgagcgcgccatctgcgcccagcgcggtgcccgggcgcatcgaacccaccaccaccaccggcttgtcgctcttgagcgtcaggttcaggaagtaagcggtttcctcgatggtgtcggtgccgtgcgtaatgacgatgccgtccacgtccggctgcttgagcagttccgatacgcgcttggccagcttcagcaggcgttcgttgttgaagctctccgaaccgatctggaagatctgctcacccttgacgttggcgaccttggagatttcgggcaccgaggcgatgatcttgtcgaccggcaccacggcggactggtaggccgcggtgttggtcaccgatgcgccggcgccggcaatggtgccgccggtgccgatgatgacgatattggccttgcgggcttcggcctgggcggtggcgggtgcggcggcggattgtgcggcgggggcgagctgcgcgtgggcagtgccggtgatcaggctcgccgacagcagggcagcggccagcgtggtgacgcgggcgaagtgtttcatgtttctcctcggtatctatacgaacgtgtggcccgtactggaatcggcacgacataccttatgggtggaatggtgccgtccgtgttcagtcggtggctgccggcagcggggcctgtgatgcagggcccgttcaggcagcggcagtgactatacgtgaggagaatttggcgcgggaggggcgctgcaagggttatgccgattcggcatgaagttgcccgggcgataactcaaatcgcatacatatcgaggtactcattgaccggcatggcctccagccgcgcctggtccagcgacgcggcaaggatggcctgctgctgtttcggcgggaagcggcgggcgaggttggtgcggaatttttccaccagcagcgggatgccctcggcgcggcggcgcttgtggccgagcggatattcgaccagcacctcgtccagcacggtgccgtccgccagcgtcacggtcagcgcattggcgatcgagcgcttggcggggtcgtgatagtcgcgcgtcagcgcggggtcttccacacaggtgatcctgccgcgcagcgcgtcaatgcgcgggtcggccgcaatcctgtcttcgtagtcggcggcggtcaggcggccgaacagcagcggcacggccaccatgtactggatgcagtggtcgcgatccgccggattgctgagcgggccctgcttgtcgatgatgcgcaggcaggcctcgtgggtgcggatggtgatggcggcgatatcggccgcgctgcgccccgcgagcgccagcgcgccgtgcagctgcatcgctgcctccaccgcggtctgcgcgtggaattcagccgggtacgagatcttgaacaggatgttctccatcacgtacgtcccgtacggccgctggaagcggaacggctgccccttgaacagcacgtcgtagaagccccaggtctttgccgtcagcaccgacgggtagcccatctcgccggtgcgggcgatcagcgccagccgcaccgcgcggctggtggcgtcgccggcggcccagctcttgcggctgccggcgttgggggcgtggcggtaggtgcgcaggctctggccgtcgacccaggccagcgacacggcattgaggatctcgtcgcgcgtgaggcctagcatctgcgcgaccacggcggtggaggccaccttgaccagcaccacgtggtccagcccgacctggttgaacgaattctccagcgcgatgcagccctggatctcatgtgccttgatcatcgccgccagcactgccttcatcgtcagcggcttgcgcccggcggcgatgtggttgcgcgagatccagtcagcggtggccaggatgccgccgaggttatccgacggatgaccccattcggcagcgagccaggtgtcgttgaagtccagccagcggatcatcgcgccgatattgaacgcggcctggaccggatcgagctggaactgggtgcccggcacgcgcgcgccgttgggcacgatcgtgcccggaacaacgggacccagcagcttggtacaggccgggtaggagagggcttcgagcccgcaaccaagcgtgtcgatcaggcagttgcgggcggtgtcataggcgaggccgctcttgatctcgtaccgggtgacatagtcgacgatgtcgaccagcacctggtccggatcggggcgttgcgcggacggcgtgtcggtggacatgaacggcctcgcgggctcagctcagctcagaacgcgtcgccgggcacgcgcacccagccttccatcagcacgcgcgcgctgcggctcatgatggccttcttgaccgcccattcgccgtcgacctgctgcgcctcggcgcccacgcgcaacgtgccggacggatgcccgaaacgcaccgcgttgcgctcgccgccgccggcggccaggttgaccagcgtgccggggatggcggcggcggtgccgatcgccaccgctgccgtgcccatcatggcgtggtgcagcttacccatcgacagcgcgcgcaccagcaggtccacatcggccgcggccaccttcttgccgctggaggcgacgtagtcgaccggcctggcgacaaaggccaccttgggcgtgtgctggcgcttggcggcctcgtccacgttcttgatcaggcccatgcgcagcgcgccgtaggcacggatggtctcgaacatcgccagcgccctggtgtcgctgttgatggcgtcctgcagctcggtgccggtgtagccgatgctctcggcgttgacgaagatggtcgggatgccggcgttgatcatggtggccttgagcgtgcccacgcccggcacttcgaggtcgtcgaccacgttgccggtggggaacatcgcgccgccggcgccttcttcctcggcggccggatccatgaactcaagctgcacttcggcggccgggaaggtcacgccatcgagctcgaaatcgccggtttcctgcacttcaccgttggtgacgggcacatggccgatgatggtcttgccgatattggcctgccagatgcgcaccacggccacgccgttgtgcgggatgcggctggcatcgaccaggccggcgctgatggcaaagggaccgaccgctgccgacaggttgccgcagttgccactccagtcgacaaagggctggtcaatcgagacctggccgaacagatagtcgacatcgtggtcgggccgcgtgctcttggacaggatgacggtcttgctggtgctggaggtggcggcacccatgccgtcgatctgcttgccataggggtcggggctgccgatcacgcgcatcagcagcgcgtcgcgggccgggccgggcacttgtgccgtttccggcaaatcttgcaggcggaagaacacgcccttgctggtgccgccacggatataggtggcgggaatcttgatctggggtacgtgagtcatggaaatctttgtcctggttggcccgggcggcatgcgtgccgctcgggccctttgtcacagcttatgcagttgcccgcgacgactcaaggaagtcctgcgcgaagcgctgcagcacgccgccagcttcgtagatcgacacttcctcgtcgctgtcgaggcggcaggtcaccggcacttccacgcgctcgccgttcttgcggttcaccaccagtgtcagcgtggcgcgcggctggcgctcgccgatcacgtcataggtctcggtgccgtccaggcccagcgtcaggcggttcacgcccggcttgaactccagcggcagcacgcccatgccgatcaggttggtgcggtggatgcgctcgaagccctcggcgacgatgacttccacgccggccaggcgcacgcccttggcggcccagtcgcgcgacgagccctggccatagtccgcgccggcgatgatgatcagcggctgcttgcgatccatgtacgtctcgatcgcttcccacatgcgcacgaccttgccttcgggctcgatgcgcgccagcgaacccttcttgacctggccatcgaccacagccatttcattgatcagggtcgggttggcaaaggtggcgcgctgcgcggtcaggtggtcgccgcggtgggtggcgtacgagttgaagtcctcttccggcaagcccatcctggccaggtattccccggcggcgctgttgagcatgatggcgttggacggcgacaggtggtcggtggtgatgttgtcgcccagcaccgccagcggacgcagcgccttgagcgtgcgttcgccggccagcgcgccttcccagtagggcgggcggcggatgtaggtgctctgcggacgccagtcgtacaggggactgaccgattcgccgctggccgcggtaatggcgaacatcggctcgtagaccttgcggaactgttcgggcttgacgctcttcgccacgatcgcgtcgatctcttcgtcgctcggccagatgtccttcaggtagaccggcttgccgtcctggtccgtgcccagcacgtccttttcgatatcgaagcggatggtgccggcgatggcataggccaccaccagcggcggcgaggccaggaaggcctgcttggcgtacgggtggatgcggccatcgaagttgcggttgccggacagcactgccgtcgcgtacaggtcgcggtcgatgatctcttgctggatcttcgggtccagcgctccggacatgccgttgcaggtggtgcaggcaaaggcgacgatgccgaagccaagcttctcgaggtcgggcagcagattcgcttcttccaggtacagctcgactgccttggatcccggggccagcgacgacttgacccacggcttgcgcgccaggccgcgcgcattggcgttgcgcgccagcagcgcggcagcgatcacgttgcgcgggttgctggtgttggtgcagctggtgatggcggcgatgatgaccgcgccgtccggcatcaggccttcggcttcctgcgcgcgggccttgtccaggtcgacggcgatgccgcgctcggccagcgcggaggtcggcaggcgcttgtgcgggttggacgggccggccatattgcgcaccacgctcgacaggtcgaacttcagcacgcgctcgtattcggcgttcttcagcgaatccgcccacaggccggcagtcctggcgtacgtttcgaccagcttgagctgctcgtcggtgcggccggtcaggcgcaggtagtcaatggtctgctcgtcgatgaagaacatcgcggcagtggcgccatattccggggccatgttggaaatagtcgcgcggtcgccgagcgtcaggctggaggcgccttcgccacggaactccagataggcgccgaccaccttttccttgcgcaggaattcagtcagggccagcacgatgtcggtggcggtgatgccgggctggcgctttccggtcagctccacgccgacgatatccggcaggcgcatccacgaggcgcggccgagcatcacgttctcggcttccaggccgcccacgccgatggcgatcacgccgagcgcatccacatgcggggtgtggctgtcggtgccgacgcaggtatcggggtaggccacgccgttgtcggcgtggatcaccggcgacatcttctccaggttgatctggtgcatgatgccgttgcccggcgggatcacgtcgacgttcttgaacgcctgcttggtccagtcgatgaagtggaagcggtcttcgttgcggcggtcttcgatggcgcggttcttggcgaacgcatcggggtcgaagccgccgcactccaccgccagcgaatgatcgacgatcagctgcaccggcactaccgggttgaccttggcggggtcgccgccctggtcggcgatggcgtcgcgcaggccggccaggtccaccagcgcggtctggcccaggatgtcatggcacaccacgcgcgccgggaaccacgggaaatcgaggtcgcgcttgcgcccgaccagctgcaggagcgaatccgtcagcgtggcgggatcgcagcggcgcaccaggttttctgccagcacgcgcgacgtgtacggcagcttgtcgtaggcacccggctggattgcctcgaccgcggcgcgcgcgtcaaagtaatccagcttggtgcccggtagcggtttgcggtttgcagaattcatggtgtagggaaatcaatataggtatgaaaaaggggtagtggtcccatgtcagcgaccaactacccccttgcccgcaggcccggatcaaggcaacccgacgcggagcaaaccggcagccggtcttacttgcgatccttcagcggcacgaacttcaggttctccggaccggtgtagttggcgctcgggcggatgatcttgttgtcgatgcgctgctcgataatgtgcgcggcccagcccgaagtacgcgcgatcacgaacagcggcgtgaacatcgccgtcggcacgcccatcatgtggtagctcaccgcgctgaaccagtccaggttcgggaacatcttcttgatgtcccacatcaccgtttccaggcgctcggcgatgtcaaacatcttcatcgagccggcatccttcgacagcttcttcgccacttccttgatcacctggttgcgcgggtcgccggtggtgtacaccgggtggccgaagccgatcacgacttccttgttctcgacgcggcgcgtgatgtcggcctgggcctcgtcggggttgtcgtagcgcttctggatctcgaacgcgacttcattggcgccgccgtgcttggggccgcgcagtgcgccgatggcgccgctgatcgacgaatacatgtccgagcccgtgccggcgatcacgcgggcggtgaaggtcgaggcgttgaactcgtgctcggcgtacaggttgagcgaggtgttcatggcgcgctcccacagcgccgacggcttctcgccgtgcagcaggtgcaggaagtggccgccgatggagtcatcgtcggtttcgacttcgatacggcggccgttgtggctgtagtggtaccagtacagcagcatcgagccgaggctggccatcagccggtcggcaatgtcgcgcgcgcccggggtgttgtggtcttccttctccggcagcacggtgcccagcaccgacacgccggtgcgcatcacgtccatcgggtgggcgctggcgggcacccattccaacgcggccttcacattggcgggcaggccgcgcaggctcttgagcttggccttgtaggcggccagttcggatttggtcggcagcttgccgtgcaccagcaggtgggcgatttcctcgaactcgcaggtctcggcgatgtcgaggatgtcgtagccgcggtagtgcaggtcgttgccagtgcggccgacggtgcacagcgcggtattgccggcggtcacgcccgacagggcgacggatttcttgggcttgggagtgacgagcggttgcgcttcggacatctgggtctcctttatgtgatgcctggtattgcctgtctgttgtcgtgcaagcggccgggacaaagcccggccgcgcgtgagtcttgcttacttgcccttgccttgtgcgaagagcgcgtcaagcttctgctcgaagtcatggtagccgatgctctcgtagagctcggcgcgggtctgcatggtatcgaccacgttcttctgcgtgccgtcgcggcggatggccgcgtagacgttttccgccgccttgttcatggcgcggaaggccgacagcgggtacagcaccatcgacacgccggcgccgccgagttcctcggtggtgaacagcggcgtggcgccgaattcggtgatattggccagcaccggcaccttcaccgcatcgacaaacttgcggtacatggccaggtcggtcatggcttccgggaagatggcgtcggcgccggcttccgcgcacgcgacggcgcgctcgatggccttgtccaggccttcgacggcgagcgcgtcggtgcgggccatgatgacgaagttctcgtcggtgcgggcgtcgacggcggcccggatgcggtcgaccatttcaccctgcgtgacgatttccttgttgggacggtggccgcagcgcttggcgccgacctggtcttcgatgtgcatggccgccgcgccgaacttgatcagcgacttggtggtgcgggccacgttgaaggccgaggcgccgaagccggtgtcgacgtccaccagcagcggcgtgtcgcacacgtcggtgatgcggcggatatcggtcagcacgtcgtccaggttcgagatgcccaggtccggcaggcccagcgagccggccgcaacgccgccgcccgacaggtagatggcccggtagccggcgcgcttggccagcagggcatggttggcattgatggtgccgactacctgcagcggatgctcgtcggcaagcgcctggcggaagcgggcgccagcggagcgcgcgaggtcggaagcggagtaggtcatggcgtatgcgttggtgaacaggacgggcccaatactgcaaggggtgtgccaagcccttggacgggatctcggaaaatccgccagcccttgtcagcgctgggctggcgggcagggtggctgacctcgccgccgatttcatgtcatcttttcagcacaattgaatttcaaaatcccaagtttggaattcaaagttgaaatcccgggctgcgtgacggacaatgtgccagcactgtacgcctgttcgtcccgggtttcaccacgcattccttccgcattgcaccatggctcctcccgtttccacgcaagcccgtccgcgcatctgggccatcggcatcagccgcctggcgcgcgcctttgccgacctgattccggcctacgccgaccgggccgaattccgcatcgtcggcaagggtttcgaggccgccgccagcgccgtggcgcgcgaggcgcgcgagggccggctcgacgtggtggtggcgggcggctccaacggcgcctacctgcgccagcacgtggacgtgccggtggtgctggtcaaggtcacgggctttgacgtgatgagcgcgctggccaccgcgcggcgcatctcgccgcgggtggcgctggtcacgcacgcgtcgacgtatgccgaggtggatgaatttgtgcgcgcgttctcgctgtcggtcccggcctatacctacctgaccgaggacgatgccgtggcgcgcgtgaaggcgctcaagcaggagggcatccaggtcgtggtcggccccggcctggtgaccgacctggccgaccgctatggcctgaccggcgtgttcctgtactccggcaactcggtgcgcatggcgctcgaagacgcgatcgaggctgcgcgcctgcgccgcatcgaggccacccggcgcgactacgtcaacaccatcctggcgcacctgaacgagggcgtggcggcagtggatgccgaagggcgcatccagtcgttcaacccggcgatggagcgttttctcggcacttccgttgctgccgcggtcgggcgcaagctgcagacgctggcgccaaacctggcgctcgaaggcgtgatgcagagcggcgacaaggagctggaagcgatccacaagctcggcgacaagatggtggtggtcaaccgcatccccatcatcggcgaggccgggaccaccggcgcggtgctgaccatccaggacgccagcgcgatccagcgcgtggaccgcaacctgcgctcgcgcgcgcgcacgcggccagccggggtgcgctacagcctggacgacctggccggcacctccgcggccatgaccgagctgcgcgagctggcgcggcgctatgcggcggtggattccaccgtgctgatcggcggcgagagcggcaccggcaaggaggtgctggcgcagggcatgcacgacgccagcccgcgccgcgccttcccgttcgtggcggtcaattgcgcggccttccccgaggcgctgctggagagcgagctgttcggctatgaagagggcgccttcaccggcgcgcgccgcggcggcaaggccggcctgttcgagtcggcccacaacggcacgctgttcctcgacgaggtgggcgacatgccgtccgcgctgcagacgcgcctgctgcgcgtgctgcaggaaaagcaggtgctgccgatcggcgggctcgacgcggtgccggtcaacgtgcgcgtgatcggcgccacccaccgcgacctggccgcgatggtgcgcgatggttccttccggcaggacctgtactaccgcctcaatatcctgcgcatcgagatgccgccgctgcgcgaccgctccgaagacctgcaggagctggccgagctgctgtaccggcgcgcccaggagcgcctgggcatggaccggccgcagcgcctgcccgccgcggcccgcgcgcggctggcgcgctaccgctggccgggcaatatccgcgagctggaaaacgtgaccgaacggatcgccgtgctggtggccgggcgccggctggacagcgaggcgctgcagcgcgagctgcaggcggccgtgccggagctgttcggcgatggcatgctggcgccggccgaggccgaggccgaggccgacgctgagcccgccgcgccggcaacacgcccgcgccgttcactggccggcgtgaagcagtccagcgaagtcgagcatatccggcgcgtgctggccgagtgcggcggcgaccgcgccgcggcctgccatatccttggcatcagcccgaccacactgtggcggcggctcaaggcagcgtgaaccgcgctggcatttacccggctgggccggcgcgccggaacggaatcggctgcaaccccttgccctccagccaggtttcattgaacagccgtgccatgtacaggtcgccgcggtcgcagagcagcgtgacgatggtatggcccggccccatctcgcgcgccagcgccaccgcggcgccgacgttgattcccgacgacccgcccaggaacaagccctcctcgcgcagcaggcggtagaccatgtccacgcaggtctggtcgtcgatccgcaccgcatcgtcgatgggcgtgtcctgcaggttggcggtgacgcggctggtgccgatgccctcggtgatcgaactgccctcggccttgagctcgcggtgtttgacgaagttatagagagcgctgccgtgcgggtcggccagcacgatgcgcacgccgggcttgtgctctttcaggcagcgcgcgatgccggccagcgagccgccggtgccggtcgagcaggtgaaggcatcgatatgcccgccggtggcgtgccagatctcggggccggtggtctcgtagtgggcctggcggttggctaggttgtcgaactggttggcccagatcgcgttgtcggtctcgtcggccagccggccggcaatcttctggtagttgtccggatcggcgtaaggcttggcgggcaccgcgcggacctcggcgccgagcatgcgcagccgctccattttctcgggcgactgcgtatcgggtatcacgacgatgcagcggtagccgcgcgccgcgcacaggtgggccaggccgatgccggtattgcccgcggtgccttcgatgaccgtgccgccgggcgtcagcagcccgcgccgttcggcatcgcggatgatgtagagtgccgcgcggtccttgaccgagccgccaggattgaggaattccgccttgccgtagatatcgcagccggtctcggcgctcaggccggccagccggatcagcggggtgtggccgatggtgccggcaaatccatccctgacttccatggtgcactcctgccgtgcccgctgcgggcgtcacattgagtgatagatcggtgcggcgggaatgacaagcagggggatggccgaaagtgatcgggattgcccgtggccgggcggatcaggcggcgttgagccagcggaaactgaaatcgccttcgacgaaatccgcgcgcgatgcgtggaaatcgcgcatatagggccggttcaggtgcgattcgagcgcgcgcttggagtcccagaccatgtagatcacgaatacccgcgcatcttcggcgtcttgcccgacgtggtagtccaggcagccgggctcggtcagcccgcgcgagcgcagcgtggtgagctgggataccagcgcctcgcggcggtgggtcttggcacgggcgatgccgactagcgtgtacgttccggacatgggtgaacgggggcgactggctggcgtctgtgagcactgggcaggccattgtagcgccggcggtaccgcccccggcaatgcccgaggacgccgtccgggcattcgggcagcgcttgacaagggcgggcagcacggttctccccgcaacggggactaaagttctgccgacggctgccgatattcggatcgaaaacaagaaaaccatcatccgagggggtagcgcatgttgagacgcatacggtcggaacaactgcaggtcgggatgtttgtcgccaggcttggcggcccgtggatcagccatccgttctggcgcgccaggttcctggtcgccaatgaggagcaggttcggcagatacagtcggcaggggtgcaggaggtctggatcgacatcctgaagggccgcaacgtagcagcgccggacacgccggaaatgcccggaccggtcccgcagtccgcgcccgaccccatggacccggccaccgcaccgccacccgccgccacccttgatgccgagattgtccgcgcgcgcgagctgctgcaatccggcaaggccgtgatcggctcgatgttcgccgacatccgcatgggccgggcgctggaggtcaacggcgcgctgctgctggtcgattccgcctcacgctcgctgtcgcgccatgggcaggcgttgctggcgctggcgcggctcaaggcgcgtggcgacgaaaactacctgcacgccttcgccgtctgcgcgctgatgatcgccgtcggccgcacgctgggcctgcccgacgacgaggtgcgcgagctcggcctggccggcctggtccacgacatcggcaagctgacgctgcccgatactccggtgcacaaggccagcgaacgcacgcccgaggaagaggagatctaccgccggcacccttcggctggctaccgcatcctgaacgaggcccggctctattcgaacatcccgctcgatgtctgcgtccaccatcacgaacgcgtggacgggcgcggcttcccctacggcctggcggggagcgaactgagcgtgcacgccaagatcggcgcaatctgcgatgcctatgactcgctcacttccagccgcccgggccaccagccgtggtcgccggcccgcgccatggaatacatggccgtgcgtgtcgacacgctgttcgaccggcgcgtgttcaaggccttcacccgcaccgtcggcatctacccgctcggcaccgtgctgcggctgcgttcgaaccggctggcggtggtctgcgcgcagaacgaggccgatccgctgcggccgaaggtgatggcgttctattccgtgtcgcagtcaaggccgactcccaccgaactgatcgacctgcgccacagcgacgaaacggtggtggcgttcgagaatgccgctgactgggggtatgcggatgagcagctgatggagatgtatgcggcggcggcatgaaccggggggcaagtcttcagcccgccacccattccccttgcctgagccgctcatacaggaaatcgcccagcacccgcacgcgcgcgctgtgcctgagatccggatgcgtcagcacccataaatcggtatccatggctacatcgactggcgccagccgcaccagctctgggtcggccccggccagcaggcacagcagcatgccggcgcccatgccgtgccgcacggcatccgccatcgccaccaggctgtcggcgctgacggcgcggcggggttcgggcacgtggtcgcgtatccagcgcgcctgggcaaggtgtgacagcgcttcgtccggcacgacccagtcataggccgaccagtccgccagccgcggatggtcggcttccgttggcaggccgagctgctgcaggtagcgccgcgccgcgtatggtgccgtctgcagccgcccgatacggcggcccaccaggtactccggcggcgcattcgccggccggatcgccacatcggcctcgcgccggctcaggctcaggaagctgttgttgacgacgatctgcagctggatgcgcgggtgcatcgacctgaattccgcaaacaggggcatcagcagtccacccagcagcgtgtcggtcgtggtcacgcgcaacgggccgctcagctggctgtcgaggccggacagctggcgctgggccgcatcgatctgctcgccgacgccggccaggcggtgcgccagggcctcgccggcggcggtcatggcgtagccggtggcatggcgttcgaagagcagggtgcccagggtctcttccagccgcgccagccggcgcagcaccgtggaatggttgacatgcagggcgcgcgcggcgccggcgagcgagccggactggcccacggcaaggaaatacttcaggtcgtcccagtctgcttcctgcatgtttgcatagcccctttgcggaattcgccagttctcgtgctgatctgcacagcctacagtggcgtggcgtgcccggcaatgggtgtcgggccgcagacctggacgaaagacatggcaatggcgtggatgctgctggtgctggcgggcctgatcgagatcgtgatggcgctggcgctcaaacataccgacggctggacgcggcccgggccgacggcactgggcatcggggcggcgctggccagcatcttcctgctcagcgcggcgctgcggcacctgccggtcgggactgcgtacgcaatctggaccgggatcggggcgatcggggtgacggtggttggcatcctgttcctgggcgaaagcgcggcgccgatgcggctggtgttgatcgggctgatcttcgtcgggattggcggcttgaagctgctgccggcctgagccccggccctggccgtgccgcgctcaggcgtgttgtgccccaaggctggcgcccggcctgagcacctcgcgggcgatgatcagctgctgcacttcggtggcgccttcgcagatgcgcaaggcgcggatctcacgatagaggctttccagcctggaagccccagctgatggggcgcgtcaacgaagagcagcgggcccgcctaacgacatgatccagttgcgcgaccgctaagaaaagctgttcgtgcggcagatcacccagcctggagccaatcgtctgccttgcacttaagccgccccattcttaggtgcaggccagggtgtcctcaaggaaatcgaggcgatcctggccccagaacacttctccacggtagacgtatgcaggcgagccgaagacaccggctgagatagcgttgtcggtgtattgtctgtactccgctttgattactggagatgcggcttggcagagaagcgcctcgccatccaagtccagcgagcgggcgatggtttgcagcgtctctggtgaggagatgtcctggtcctccaaccattcggcatgaagaatcgcttgggccaaggtgccttcgcaaagtcccgcgtgcttcgcagaaatgaccatgcacgaagcgagatcaccgtttgggcacatgtatctaggctgcggattgaccggaatccctagccgcttgcaccaacgggcgagttcggtgatccggtaagcctgcctttcctgagagcgctgcccaagcaaaatgccccccgtctgcgagtaaacgtacggcaggtccacaggcatatagttgatcgcggcgccttggcgtttggcaagttccacaagacggccgtgtccgagataggcccagtccgaattgatccaaaagtaatagtcaattgccttggtcattgctcagttgccttcatgcgagatacacagaagatcgacaagcaccccagggcagtgaggtagccggcgagatacagcggactaccttggccgagcttaagcagccaggtcgccaccagcggggccagtccgccaccgatagcacccgagacttgcacggcaagggaaataccactgtagcgaacttccgggggaaattgcacagaaaataggctaccttcggggccgtacagcatggcgtagataaggccgatggcgatcaccatggcgagatataccgcgccgacgcttcccgagccaagaagcttaaaaaacgcgaacccgaagaggcaaattccgaccgatccgaccacaaagatcttcctatgcccgatcttatccccgagcaagccagtgagaggcattgtgaacagtgcgacggcagcacccgcgatcacggcattcagcatcatcgtcttgggtaagccaagtgttaccgtaccgtaggtcagggcaaaggtagcgaccgtgtagaaccacgtgacttccgccatccgcgcgcctgataccttgagcaacgacaaccagtggtgtttgacgacatggaccaccggcacctcgacctcatggcctctttgcttgaccttttcaaagtcaggggactcggcgacgcggatgcggatgaaccatccgacagccagaagcaacacactggccaggaacggaaggcgccagccccaactcaacatatccgcctcaggcagtctcgcaacgcttgccattgccaacgatgagaggataaggccaggagcgacgccggtttgaggaaggctaccgaagaagcctttcttaccttcgggggcatgttccacggccatgagaacggcgccgccccattcgccaccgacggcgagcccctggagaaggcgcatcaatacgaggatcacggcggcccagtaaccaatttgctcataggtcggaatgaggccgatgatgatggtcgggatacccatcatcatcaacgtgatcagcagcatggattttcgcccaaccttgtcaccaaagtggccgaagacaatgcctccaaggggccgggcgaagaagccgacggagtaggtcgcgaacgcggcgagggtcccactgatcggatcgaagctgggaaagaagatcttgttgaaaattaacgcggcggcagttccgtaaatgaagaagtcgtaccactcgatagtcgtgccgagcatgctggcaatgcctgcgacggtgtgctgcttggccgtcccggcatttgcgctggcgatgcctgcttgtgaattggcgggatacatagaatgcctctgtgacttgcttgatgggggcgatgtgctcgagcgtggtcactcaaatgcacgcttctttgctggggggatatgtactgcgccggtggtggtcgatgtttgccttacggggttattcattgcgtctccggtggtgactagcggcatctgtgcgtgccaatctcggtatgaccctgtcccccttccgaaggaccagccgctcgctaccgaaaaaaatcgggttggctggtagtgccagtcgggccaagatggccatgggaacacttgccacctttgctaacggggcaaaatcatgctggaggtcgtcggctcgtcttttgggaccgaaggctgaaggtggtgcgactcaacgctccgtctgacggcaccagtaatcaaaagtaccgttgacgatcgaaggcttgagcaggtagtcgtgagcttcacgggcgagatcgtcgggtagcgaggtaagcggcccgaaggtacgggcgcgcacctgcatgcgggcagcgcgctccatgtagacagaaagataggtcgcttcttgcacgctacagccggtgctcaactgaccgtggctggccagcaggatcgagcggttgctgcccagagcgccggatatgatcacgccctcctggtcagcgatgggaacgccaggccattccgcaaggaacgcgcaatcgttgtgaaacggcgtcatgtccatttgcgagacgattagcggttgcttggccgcggcaagtgccgacacatacggagaatgcgtatgaatgatgctatgggtgttggggcgatcggcataaacccacagatggaaccgcgttgccggattagccatcccagtgccgctgagggtattcaggtcttggtcgacttctataaagtcggcttcggtggcttcgtcaaaacccagaccgaagcgcagggtccagtaggcgcctgggcgctccgagcgtgcactgatctggccagccaagccagcttcctgcccggtcatggccaggatgcggcaagcataggccagcgtttgctgcagcgtgcgcttgcgaggcttgagatgggcacgcatctcctgcgttgcgcgttcgtcgaagtattccttagagcgaagttccattttgtttccagtcgtattggttgccgggcgtagactgggcccgacgactccagaacgcctctgctgccccccgtggggagcacactttggcgccatcccgacttggccggtgggatgtcggtacgactggattatgggaagtcagaaggggctgagatagcgcggagcgctcatacttcctatgactgggcgtactacctcagactgtttgagcgatcttcagcatgtgttttatcagcgctgtttgagctctttctcgcttggtaatggcgacaacgcgccgactgagacgagggtttattatgcgcactcgtgacagcccatagttctcgagcagttgcgtcggtactcggtctggcaaaacgcactgaccgccggttgatgcgacgagcctgagcatcgcatcgaccgtgtccacttccgccacgacatttgtgtccaatctcttcctgtgcagcattcgtcttagcgcatagtgctcaggaaaagcgacaagcggtactctttgcgcctctaggtcgaccccttcgagtgcggccaagggcgaattttggctgacgatcaacgtcatgacatcgtcgaatagcggcacgatttccacggcatccgaggctaccgctacgtcgtaaacaaagcctatatccgctttgcccgtctccaccagctctacaacttccggtgaactccgccccatgagcgagacgttggcatttgggcgctggctcatgaatcgggagacaacatctggcatgaagtagtagctgagggtatgaataacagccactcggaggttgccttggctgactccctgctcctcgcacaacaggagaatcgtattgtcgataacgtcatatgcggtctgggcggcagcctgcagtttgtggcctgcgtcagtaagggcgaccccgcgcccgtggcgttcgcacaatttttgacctactgctgcctcgaggtgggccagctgacggcttaagccggattgggttagaccaagcgtcattgcagcgcctgaaatggagcgggcctgcgctatcgccaggaatagccttatctgagcatctaaagccttcataattttgggggtgtccctcttcggctagttatgacgttcaaccgttccgccatttcgaaccgacgtggcttcagcgctttcccggtcggagcccgccatccactagactttgggcgtcaatggatcccgctgtggagatcttgctggatccatcgctcaacaggcatccggcattaacgcaagttccgcaccatatgtgtattggtactatgcccggtttgatagtcgacgacggcgatgtatcccggcatgttccattccttgccgttcgatccgatcaaggacttcgtgccagtcggcatcttcggcattgcgccgatggtagtggtcgggcccggctcgcccatcgccagcttcaagggcatgcgcgcgaacgcctctgccttgcggccgtgcagcagcgcatgcatgcctactgcgtcgagccgagcaagctgacgggggggccgcgagacacgccgggtgccgggcgatcgcggtgccggtagaggcggaacgagcagggtgtcaggcgcgttttgtacactatcaggtcgattcacccggctgcagacgcccccctatgagtttcgatgccctgctggagttgttccagcaacgtattccagcccatccgtgggcccagattgcctcgtacctgctggtgctggtgctgatcgccgtggtcgcgcagtggctgttcggccacgtgatgtcgcgcatcgcccatcgcttgctgacggtctggggcaaggcgccctggagcaaggcgctgacgcgatatcgtgcctatcggcgcttcggctatgcggtcgggttcggggtgatcaccgtcggcatcggcgaagtgccgcacatgggccgctatgcgctggccatcgagcgcctggcccatgccggcctgtggatctgcttcttcctgatgcttggcggcgtgctgagtgcctggcaggacgtatacgccagcagccgccaggcgcagacgcgctcgatcaagggctatatccaggtggggcgcctcgggctggggctggtgtgctcggtgctggtgctgtcgatcctgatcaaccgctcgccgctgtggatgctgtctggcctgggcgcgctgtcggcggtgctgctgctggtgttcaaggacacgctgctgtcgctggtggccagtactcagctgacctccaacgacatgctgcgcatcggcgactggatcgagatgccccagtgcaatgccgacggctacgtcagggacatcgcgctgcataccgtcaaggtgcagaactgggacaacaccgtgaccacggtgccgacctacaagctgttctccgagagctaccgcaactaccggcagatgttcgaatccggcgcgcggcgcatcaagcgcacgttgcggctggatgcgggcagcgtgcgcttcctggaggaccgggaagtgcaggcgctgatgcgcttccggctgctgcacgactacctggaggagaagcaggccgaggtcgacgaggccaaccgcctgctgattgccgccggcaatgacccggtcaaccggcgccggctgaccaatgtcggcaccttccgcgcctatggcattgcctacctgaaggcgcacccggagatccaccacgatctgctgctgaacgtgcgcatgatggagcccgattcgcagggcatcccggtggagatctattgctttaccgcgctgaccgcgtggatggactatgagcgcatccagggcgatgtcttcgaccacctgctggcgatcctgcccgagctgggcctgcgcctgtaccaggcgccttcaggcgcggacctgaccggcgtgcgcatctcgccggtgctggccgcggcgcaggtggcggcggcacaggccgccgtccatcatgcgcctgcccacggcgccgccgcgagcagccatccgatctgagctgcgcctgacgctcagccgaccgcgcgcggacgcacgcggctggcggcttccttggcgcgggtgcgggcggtgtcgacatcgtcggcgtacgccagcgccacgcccatgcggcgcttgacgaagctctcgggcttgccgaacaggcgcacctcggtctgcggcacgctcagtgcctggtcgacgccatcgaagaccaccccctgggcatccacgccgccgtagatcacggcgctggcgccggggctgcgcagcgtggtgtcgaccggcaggcccaggatggcgcgggcatgcagctcgaactcgttctgccattgcgtggccatggtgaccatgccggtgtcgtgcgggcgcgggctgacttcgctgaaccagacctgctcgccctttacgaacagctccacgccgaacaggcccatgccgcccaggtctgccgtgaccgcctgcgcgatgcgctgggcggtttccagcgcggcggggtgcatcggctgcggctgccagctttcgacgtagtcgccgctgacctggacgtggccgatcggagcgcagaactgcgtttccacctggccgctggcgcccatggcgcgcacggtcagcagcgtgatctcgtagtcgaaatcgataaagccttccacgatcacgcggccgtggctgacgcggccgccggccatggcgtagtcccaggccgccttgacgccctcggggccgtcgatcttgctctggcccttgccggagctgctcatcaccggcttgaccacgcacgggtagccgatgccgccgtcgatggcagcctgcagttcatccagcgaatcgcagaacttgtacgggctggtgggcaggccgagcgattcggcggccaggcggcggatgccttcgcggtccatggtcaggcgcgcggcgcgggcggtggggatcacacgcacggtgccggcggcttccagggtttccagcatgggcgtggcgatggcctcgatctcgggcacgaccaggtgcggcttttccgcctcgatcagcgccttgagctggtccgggtcgctcatggcgatggtgcgcgcgtggtgggctacctgctggccgggggcattgtcatagcggtcgacggcgatggtttccacgcccaggcgctgcaatgcaatcagcacttccttgcccagctcgccggagccgagcagcatcactttggtggcagagggggagagaggcgttccgagtgtggtcatggcagcggatggggcgggaaggaaagccgagattgtacgtgttaggggactgtctttggcgccggcgagcgcgcatattggtatgggccagggaagggcgcctggcgcgcgtgccacccaattcagcgacgaaccataaaaaaacccgcgcgggggcgggcttgaaaaggcctgaggatccaagaccggaccgctcagtgttcatgctaggtgctaagcgcgcgctccgcatcccccgttcggggcggcccggcacagtgtttcaggacgtggccatcagcggcgggcgccgccgcgtggccacggcaaatgcaatttgcgccagacccgcggccagccccagcgtcacgccgacctgccacgccacggtgtaggaacccagcgcgtcgtagaccagcccaccgccgaaggcgccgaaaaagctgccgatctggtggctgaagaacgccacgccgcccagcatggcctgccagcgcaggccgaaggtctcggcgatccagcccgataccagcggcgccacgcccagccacaggaagcccattaccgcggcgaacaccagcgtgctctgcggcgtgggcgcggacgtgaagtaccaggtcagcgccagcgagcgaatcgtatagatgccgcccagcagcatcagcttgttgaagcggccgccggcccagccgaagaagatgctgcccagcacgttgaagccgccgatcacgcccagcgcctgcgcgctcagcatcgggtccatgccgcacacgtccagatacgacggcaggtgcgtggtcaggaagaccagctgcatgccgcagacgaaatacgccagcgccatcaccacgaacggcgcgtgccgcagcgcggtgcccagcgcttcacgcgcgctgtcctggccgcgccctgcgggcgacaccagcggcagccggtccacgcgcccggcaaaccacgccgcgggcagcatcaccagcgccagcagcacgaacgctgccagcccggcgcgccagccgtaggcctgcgtcaccatctgcccgatcggcgccgccagcagcgcgcccagcgagcccgcgccagacaccagccccagcaccgtgctgcgcagcgccgccgacaccggccgcgccgccaccgccatcgccagggcgctgccggtgcaggccatcgacgcgccgatggccacgcccgcgcccagcgtgacgccgaccatgctgtgcgcggtcgccagcagcaccagtccggtcacatagagcagcgagccggccagcatcagcggccggaagccgatccgcgtggcccaggccccggccagcggctgcagcaggccccacgccaggttctgtaccgcgatggcgatggtgaaatccgataccgagatgccgatgtcccgcgtcagcggcggcatgaagatgccaaggctctggcgcaggcccatggccaggctgagcatcacggaggcgccgatcaggatcggcaaggccgggcgcagggcttcgtagcgggaaggcgcggtgggggtaggcacggtgtggtctcgtcgcttgtcgttatcgttgtgagccccggggcgctttccatgtctttacatttaagcgtgcgctgaatataccgcagggtagggcgagcgtatgcgccaggctcaaccgtgtcaatttggctttgggcgggtccgccttccgctttgccaaaggcggccccacacctcgctagtccagactgaccttggatgcccggatggtctcgccccagcgcttgatgtcgccgctgaccagcgcggcgaacttcggctgcggttcgccgccagggataccgcccatgtcgcggaacctggccaccacctcggggtcgcgcatggccttgcccagcgcttcctgcagcgtggcggcaatggccggcggggtcctggccggcgcaaagaagcccagccagcccatcaccacgaaatccttcacgccggcctgcgccatcgtcggcacgtccggcagtgccggcaggcgttcggcgctggtcaccgcaagcgcgcgcagcttgccggcgcggatctgcggcagcgcctgcgtcaggttgtcgaacatgaaggtggtttcgcccgccagcaccgaggtggtggcgggtgtcgaccccttgtatggcacgtgaattacttcggtgccagtgcgcagccggaacagttccgccgtcaggtgcgtggtctgcccgatgccggccgaggcgtaggaatacttccccggggactgcttgagctgcgccaccagctcggacacgctgcgcaccggcgcctgcgcgccgaccaccagcacgttggcgaacgagatcaggtccgtcagcggcatgaagtcctgtggctggtaggacaactgcttgtaggcgctgtagttgattgcgtgcgagccggtattgccgaccagcagcgtgtagccgtccggcgccgcgcgcatgaaggcctgcgtgccgatgatgccgccgctgccgggcttgttgtcgaccaccaccggctggcccaggatggccgacagcttctgcgccaccaggcgcgtcgggatgtcggtggtgccgcccggcgcgccgggcacgatgatggtgatggggcgctcaggccaggacgcggcgctggcgggcagcggcagcgtggcggcggcggtcgccagcagcagggccgcggacgtgttgaacagcgattctggcagcttgtgtttcatgggtctcctccatgttctggtctgtgtgctgcttggcatgtgcgaacggccggcttgcggccggccgttctctagcccagggcggatgacatcgatgccctcggtctggcgtgggccatcacttgcccgtccacaccggcctgcgcttctcggcgaatgcggcggcaccctcgcgggcatcggccgaggtgaacaccggcgccagcagcgggcgctggcgctcgaacatctcctcggcgctccagtcggcggactcggccacgatctgcttgctgaccgcaaccgccagcgggccgttggcgccgatctcttcggccagcgccagcgcgcctgccagcgcctggcctggttcggtcaggcggttgatcaggccataggcgtgggcctgttcggcgcccagcatattgccggtcagcgcgtattccatggcgatgtggtacggcacgcggcgcggcaggcgcatcaggccgccggcgccggccaccagcccgcgcttgacttcaggcaggccgaacctggccgcgttcgacgacacgatcaggtcgcacgccagcgccagctcgaagccgccggccagcgcatagccttcgacggcggcgatcagcaccttgcgcggcggcttctcggtcagcccgccaaagccgcggccaggcaggctgggacgcttgccttccaggaagcccttcaggtccatgcccgagcagaaggtgccgcccgcgccggtcaggatggccacgctcaggtcgtcgcggctttccagctggtcgatggcggcggccagcgcggtcgcggtctcgaagtccatggcgtttttcgcctggggccggttcatggtgatcagcagcgtattgccgcgggtttccagttgcagcgtgtcgctcatgcgggattccttgtcagaagtcggtatcggtgcagcgcgcggctcagcgcggtgccatgcggatggcgccgtccaggcggatggtttcgccgttgagcatggggttctccaggatgtgcagcgcggtggacgcgtattcatccggtgcgcccaggcggggcgggtgcggcaccatggcgccgagcgaggcgcgcacgttctccggcagcttggccagcagcggggtgtcgaacagtcccggggcgatggtgcagacgcggatcgcgcgctgtgccaggtcgcgcgcggccaccagggtcatgccgacgatgccggccttggccgaggcatagggaatctggccgatctggccttcgtaggcggccaccgacgcggtcagcacgcacgcgccgcgctcgccgtcgatcagttcgttcttggccatgcgcgcggcccccaggcgcagcgcgttgaaggtgccgatcaggttgatgcgcacgatcgactcgtacttttccagcgaacccggcgagccgtccttctcgaccacgcgcaccgggccgcccaggccggcgcaatggatcagcgcgcgcagcggggcaatggcttcggcggcgtcgtagacggcgttcatctggtcggtgtcggtcacgtcggccttgaggaagcggaccttgccgctgaactcgtcgaccgcggcattgccgcgctcttccgacaggtcggcgatcacgacgtcgacgccgcgttccaccaggcgccgcacgcaggccaggcccaggccggaagcgccgccggtcacgacggcggacatattggtcagtttcatgctgtgtctccttgactggatgtctggttcaggcgccgcttacaggcgctcgatgatggtggcgttggccatgccgccggcctcgcacatcgactgcaggccatagcgctggccgctgtcttccagtgcatgcagcatggtggtcatcagccgcacgccggaggcgcccagcggatggcccagcgcaatggcgccgccgcgcgggttcaggcgtgccgggtcggcgccgagcgcgcgctgccaggccagcggcacgcaggcaaaggcttcgttgatctcgtagtggtcgatctggtccagcttcaggccgctcttcttgatcgcgcgctggctggcggggatcggggcggtcagcatcatgaccggatcgtcgccgcacacgtcgaacgccacgaagcgagcgcgcggcttcaggcccaggcgctgcgccatggattcgctcatcagcagcatggcggaggcgccgtcactgatctgcgaggcattgcccgcggtcacgttccagccgatctgcgggaagcgggcgctgagttcgtcattgcggaacgaggcctgcagcgtgcccagcttctccaccgaggtgcccgggcggatggtttcatcctgctcgaccagcccgttgggcgtgctgatgcccaggatctcgcggcggaaggcaccgctttcgcgcgcggtggcggccagctcgtgcgagcgggccgaatagctgtccatgtcgtggcgcgacagttcgtacttggcggccaccagctcggccgcaacaccctgtgacaccaaacccggcgcatagcgcgcttccatcgacgggccgtacgggttctggccaatgcgggccgagcccatcggcacacggctcatcgactcgatgccgcaggcgatgacgatgtcataggcgccggccatgatgccctgcgcggcgaaatgcaccgcctgctggctggagccgcacttgcggtcgatggtggtggccggcacgtggtcaggaaagcctgccgccagccacgccacccggcccgggccggcggactgctcgcccgcctgggtcacacagccggtgatgacgtcgtcgaccaaacccgggtccagcttgttgcgctcgaccaggcccttgatgacctgggccagcaactcggtggcatggagttcggtaaaggccgagcctggcttggagcggcccatcgggctgcggatggcgtcgacgatgacggcttgttgcatgcggtgtctcctgaaaaggctgaacgttgcgagtcgtggctgggatattgagacgtctgtaccgaaatgtgatcgtccaatacgatgaattgggattctggcttcggaaaagcgtcgtgtaaacccaaataacccggtttgactttggaaaaaacgaagggcaacatccgggttttgagacgcacgtatcaaaaaaccttgaatcaaggcaataacatgacgaatgcaccacacgcctccctgaccccgccgcccgccgatgccgacggcgaggcgcgccttgtcagcgcgctggcgcggggcatttcgatcctcaactgcttttccccgacggtgcaggagctcagcagccgcgaactgatggagcgcaccggcctggccaagccgaccctgttccggctgctcgacaccctgtgcgaactgggcctgctgcactattcggagcgcttgtcgcgctacgtgcccggggtcgggctgatcaacctggccgcacccgcgctggcacgcatgacgatccgccagctggcgcggccggccatgcaggagctggcggaccacatcgccgggcaggtggagctgatcgtcggcagcggcaatgcgctgacctacgtcgaaatcgcccagggcgtgggcagtcatgtgttccggcccgaggtcggcacgcgcgtgtcggtctcgcgcacgggttccggacgcggctacctgatgctgttgaccgaggccgagcgcgaggcgtacctcgcccagctccgcgctgccgatccgcagcgcgccgactggctgcaggagcgcctggccgatgccgcccgcgacctgcaagaccacggcttctgccgcggccaccgcgacctgcaccgcgaggtggagtcggttgccgtgccgatgcgcacccgccgcgacggcgaggcgtggatctttgccgcctcggtgccggtattcagccagcagagcaagcagatggaggaagacatcggcccgcgcctggtgagcctggtgcgcaatgtagagggagcgctgggcgtggcaggctgagcggcacagcagtccgcctgacgctcagctggtcagttgcctgtgaacactggcgtgcgcttgtccaggaacgcctgcactgcctcacggtggtcggcggtctggtgcgacagcgcctggaagccggcggacagttccagcagcgtatccaggcgggtatgcatggcctcgcgcatcaggcgcttggccaggcgcaccgcgtgcggcgggttggcggcgatgcggccggccagctcataggccgtgggcagcagcgcctcgggcgcgaccacgcgcgacaccaggttccattccagcgccagcctggcatcgatcggctggccggtgaaggtcatctccgccgcccgcgacaggccgatcacgcgcggcagcagccatgcgccgccgtcgccggggatgatgccgagcttgacaaaggactcggcaaactgcgcccgctccgaggcaatgcggatgtcgcacatgcacgccaggtccagccccgcgcccatggccgcgccattgaccgcggcgatgaccggcacttccaggttgaacagcgccagcggcagccgctggatgccgcagcggtagtcctgacggatttccatgcccggcactgcgccggaggcctggcgttccatgtccttgatattgccgccagacgagaacgccgtgcccgcgccggtaatgaccaccgcgcgcacgctgcggtcgccgtggatgcggtcgatcgcggccaggaactccgccacggcggtattgccggtcagcgggttgcggcgctcgggctcgttcatcgtcagggtgacgatatggtcctgctgctcgtagagaaggaagttgctcatggtggtgtctccggatgcgcgatgcaggctggttgcctgccttggcgccaaggctaagccaccggcgcccgcaccgtccaatattcatttcttcatcagcaatatcctgcacatatcgctgggcaggcccgggacgccagccatcttgcgccggcggcgcgactttctgcgggtaatccctgtacccataatcgaatcgctcaccgattatctataggccccggccaccgcgcggcatcgcgcagttccgtaatcctgcagtcccgaattccaacaagaatgccctacaggagacgatatgagccatgcgttgacgcaggcgacggaccccgttgcccccgatgttgcaatgcacccccaccgcaccatgaggcgcgccacaggcttcctggcagcggccctggcgctggtgatgcaggtcttgcccgccggcgccgcggcgccgcgcaatgcggccgccaaggttgacggcgcctttatcagtgcccgccagcaccgcccgcgactggcccagccacggcctggactatgccgagacccgcttcagccggctcaggcagatcgatgccgccaacgtgcgcgacctggggctggtgtggacctacaacctggagtcgacccgcggcgtggaggcaaccccgctggtggtggacggcgtgatgtacgtcaccgcgtcatggagcgtggtgcatgcggtcgatgcgcgcaccggcaagcggctctggaccttcgatcccaaggtggaccgctcgctcggctatcgcggctgctgcgacgtggtcaaccgcggcgtggcgctgtaccagggcaaggtgttcgtggccgcctacgatggccggctgatcgcgctggatgccgccagcggccgcaagctgtgggagaaagacaccatcatcgaccgcaagtactcgtacaccatcaccggcgcgccgcgcgtgttcaagggcaaggtcatcatcggcaacggcggcgccgaatatggcgtgcgcggctacatcaccgcctatgacgccggcaccggcgagcagaagtggcgctggttcacggtgccgggcgacccctccaagccgttcgaggatgagtcgatggctgcggcggccaagacctgggaccccagcggcaaatactgggaggcgggcggcggcggcacggcctgggacacgctggccttcgaccccgagctgaacctgatgtacgtgggcaccggcaacggcgcgccatggtcgcgcagcaagcgcagcccggccggcggcgacaacctctacctggcatcgatcgtcgcgctcgatcccgacaccggcaaatacgtctggcactaccaggagaccccgggcgacaactgggactacacctcgacccagccgatgatcctggccgacctgaagctcgatggccagatgcgcaaggtcatcctgcacgcgcccaagaacggcttcttcttcgtcatcgaccgcaccaacggcaagttcatctcggcaaagaactttgtcgacgtgaactgggccaccggctatgacgccaatggccgccccatcgagcggcccgaggcgcgcgccaccgacaagccttatgactcggtccccggtccgtacggcgcgcacaactggcatccgatgtcgttcaacccgcagaccgggctggtctacctgccggcgcagaacgtgccgatcaacctgatggacgacaaggcctggaacttcaatgaaggcaaacccggcacgccgcatggcaacgtgggctggaacaccgccaaattcctgaacgccgagccgcccaagggcaagcccttcggccggctgattgcgtgggacccggtgcagcagaaggccgcgtggacgcaggaacatgtgtcgccgtggaacggcggcacgctgaccacggccggcaacctggtgttccagggcaccgccgacggccgctttgtcgcctatgacgcgcgcagcggcgacaagctgtgggagtcgcccaccggcaccggcgtggtggcggcgccggtcagcttcgagttgaacggcaagcagtatgtgtcggtggcagtgggttggggcggggtctacgggcaggcccagcgcgccaccaaccggcaggggccgggcacggtctacaccttcgccctcggtggcaaggcaccgctgccggcctttgccgagtaccgcaccgccaagctgctgcagggcgtgaaatatgacccggcgcaggtcaaggcgggcaccggcctgtacgtcagcaactgcgtcctgtgccacggcgttcccggcgtggaccgcggcggcaatatccccaacctgggctatatcgatgccgcctatatcgagaacctggacaaggtggtcttcaaggggccggcgatggcgcgcggcatgcctgacttcacaggcaagctgacgccggacgatgtcgagaagatcaaggccttcatccaggggaccgctgacgcggtgcggcccaagccctgagggcagggccgggcctcagtcctcggcctggaagccggtcgcctccacgatcggcttccaggcggcgcgttccagctggatgcggcggcggccttcgtggccggggcgcgccaccacttccaggcccagcgcttccagcttggccgcggtggcggcgttggccgaggccgcgaggaacatcttttccacttgcgccaccacgtcaggctgggtgcctgccgggacgaacacgccgtaccagctggtggcgtggtcgtactggctgaagccctgttccttcatggtgggcacttcgggcagcgccttggcgcggcgcgtgccgctcacgccaaggaagcgcagcttgccgcccttgtacagcggcatcatgctggccacggcatcccagccgatcgacacattgccgctgaccacatccaccagcatcggcgatgcgccgcgatacgccgcgggcgtgatggcgatgccttcggccttgcccagcgccaccgtgccgaggtggccggcgctgccgatggtggccaggcccaggctggcgccgcccgggttgcgcctggcccagctcacgtattccttcatgttctggtaaggctgctgcacgccggtcgcgaccgcggtcggcacatcggtcagtaccgctgcgggcaccaggtccttgtcggcgtcgtagaacagcttcttgtaggtcagcggaaagatcgtgaacaggggcgaggggccgatgaacacggtcttgccatcgggcctggcgcgcttcacgtagtcgagcgccaggcgcgccgacgcgccggggcggttttcgaccaccaccgtgccgtggccgtcctggcgcagctgctcggcatacaggcgggcaaggctgtcggcggcgccgccgggggcgtagccgacgatgatatgcatcggctcggcatcggccgcgctagccggagcggtcatggcgaaggtggcggcagcgacggcggtcatggccagcagccggcgcgtcaatcggacttgatcagtcatggcagtcagggaacgatgttgagagagtgtcagggcagggtgggccactggcccgtgaggtcatggaccgattcgtacaaggccgccacacgcagcagctgcgcgtcgccgcggaactgcccgaccagctgcagcccgatcggcagcccgtcgccaccaaagccgcagggcaggctgatggccggatgcccagtcatattgaacggcatggtccacgggaaccagttcgcgcgcacatcgggatagtcctggccgtcgatttcgatctggccgaacaggtcttgctccagcggcagcgcggtgcgtgtgatggtgggcatggcgagcaggtcggcgcgtcccagcagcgcctgcacgcgcaggaacagttgcgagcgctcgaacatcgcctgctggtattccactgcggtgaatgcggcggcggattccacctggcgcacgaaggtcgggctcagcgcctcgcggtgctgggccacgatcggcgcaaagcgcgtgcgccatacggtgtggttgatggcacgccagacgggctcgacgtcgaacccctcgccgccgaacggctccagttcggcgcccagtgcgcgcagcttgtccaggctggcctcgaacgcgcgcgccacgtccgccgacaccggacggcccggcggcgccaggcaatacaggatgcaccggccacgcaggtcgccctgcggctgcgctgcggccacgtagtcggcggcgggcactccgatcgaccacgggtcgcacgggtgttcgccggccatggcctgcagcatcaggccggtgtcggccaccgtgcgcgtggtcggcgtcacgtaggtctggttgccgaacaggtcctgcgcctggctgtgcggaatcaccccctggctctgcttgatgcccaccacgccattgcaggcggcaggaatgcgcgtggagccgccgccatcggtcgccaccgccagcggcgccatgccgctggccactgccaccgcggcgccgccgctggagccgccactggtgcgctcggcgtgccaggcattgcgggtgcgcccgaacagcggcgaatcggtcaggcttttggagccgaattccggcgtggtggtcttgccgaccaggatcgcgccctgcgcgcgcaaccgcgccaccgccacggcgtcttcggccggcacgttgtcgcgcatcggcacggcgccaaaggtcgtgcgcacgccgcgcgtgttgacgatgtccttggcggtaaacggaatgccgtgcagcggaggcagcggccggccggacatcacttccgcttccgccgcgcgcgccgcggccatggcctcgtccgcgcacagcgtgataaagcagttcagcaccggctgcagccgctcggcgcgcgccagcaccgcagcggtcagttccaccggcgagatttccttgcgccggatgcgctgctgcagttcggcggcgctggcaagacaaagcgcttcgctcattggacgggcgtctcctgaagatggccgcgcgtgccggtatcggcgcgcgcaggcgtgatggcgatacgctggcatcttacaaccggcccgcgcacgcggggactatcgccgccaagtgccgtcggcgaggaagcgttcggccagctacgcgttgccgttcaggggcgcgccggcgatgacaggtaggcctgcaggccgtctgccggcaaggcgcgtgaaaacagccacccctggccgaactgcgcgccgcgctctcgcaggaagcgcgcctgctgctcgatgccctcggccacgacctcgaatcccagcgcctccgccatggcgatgatgtgcggcgccaccgagctggaagccgcctcgcggccgatggtactacgcggcggcgctgctgcgcagcacgcgccgtcgccgcgcgtattcagattccttttgcaaggcgatgaattttttcgtgcgccgcgcaataaggcacgcatgacttgcgcaatgccggcagaatccggaaagtagggggaacgactgcccgcacagaggacctggcccatgaccaccgccccatttgcaagacccacaccatcggcccggcttgccgcccggcacacgccggccgtgatcccgggcaacggctaggggggcgcatggcgctggtgctgctgatcgcgctgcctctgctggccgcggcgctgacgtggttgatcggcatgcgcgccgcgcgcatgctggcgcctgtcatcatcggcttgccgctggccgcgctggtgctgctgctgagcctgcgcggcgcggtcttcgagcagccggggcatgcgctgggctggcgcgtggcgtggctgccgcagctcgggctggacctgtcgctgcggctggacggcctgtcgtacctgtttgcgctgctggtgctcggcgtgggcctgctggtgatcctgtacgcgcgctactacctcgcgcgcaatgaatccgcggtgcgcttcttctgcctgctgctgctgttcatggcggccatgctgggcgtggtgctggcaggcaacctgctgctgctggtggtgttctgggagctgaccagcatcctgtcgttcctcctgatcggcttctggtcatggcgcaccgatgcgcgccagggcgcgcgcatggcgctggcggtcacgggcggcggcgggctggcgctgctggccggggtgctgctgctgggccatatctgcggcagcttcgagctgtccgtggtgctggcgcaggccggcaaggtgcagcaccacccgctctacctgccgatgctggtgctggtcctgctggcagtcttcaccaagtcagcgcagttcccgttcagcttctggctgccgcatgccatggccgcgcccacgccggtctcggcctacctgcactcggccaccatggtcaaggccggcgtgttcctgctggcgcggctctatccggtgctggacggcaccaacagctggttctacctggtcagcatgaccgggctggccacgctcatcgtgggcgccggcctggcgctgctgcagcgggacctgaaagggctgctggcttattccaccatcagccacctgggcctgatcacgctgctgttcgggctcgatacccagctcagcacggtggcggccatcttccatatcatcaaccacgccgtgttcaaggcgtcgctgttcatggcggccggcatcatcgaccatgagaccggcacgcgcgacctcgaccgcctgcacgggctggcgcgctacatgccgcacaccgcagtgctggccatcgtggcatcgctgtcgatggcgggggtgccgttgttcaacggcttcctcagcaaggaaatgttcttcggcgagaccctggcgcagggcctgctgggcgacttcaactgggtgatcccgaccgcggcgacgctggcgggggcgctgacgatggcctattcgctgcgctttatctacggcgtgttcttcggcgcccggcagcccgacgtgcccaactacccgccgcacgagccgccgcgcttcatgaaggtgccggtggagttcctggtggtgatctgcctggtggtcgggctggtgccggcctataccgtgggcgacctgctggcggcggcttcgcttgccacgctgcgcgcgcccctgccagagtacagcctgaacctgtggcacggggtcaatttgccgctgctgatgagcctggtgtcgatggccggcggcgcggcgctgttcttcctgcgccgcgacgcgctgcggcgcctgcagcaggcaatcgaccacctgagcgcgcgccagtcgttcgagcgtggcatgcatgcgctggaacgctttgccgctgccgtcacgcgctggctcgagaacggctcgctgcagacctatgtcgcctggatgctgctggcgctgctggccgtgccggcatacttcctggccgacctggaatggctcggcggcagcgtgccggcgggcgccatcgacctgatcggggctgccacgctggcgctgctcgggctgtgcgcggtgggcgtggtggtgacgcaccgccagcggctgctcgcgctggtgctgctgggcggctgcgggttgatggtgtcgatggcgttcctgcggttctccgcgccggacctggcgctgacgcagatctcggttgaggtggtgacgatcctgctgctggtgctggcgctgttctacctgccgcacgagacgccggagcgcgccggggctgcgcgccgcgggcgggatgcggtgctggcgctcggcggtggcaccttgctggcagtggcggcttacgccgtgatgacgcggccgtatgacccggtgtctgccttctacatcgaccagtccgtgcccggcggcggcgggcacaacgtggtcaacgtgctgctggtggatttccggggcttcgacaccatgggcgagatctgcgtgctgctgattgcagggctggcggtgcaggcgctgctcaagggcatgcggctggacacgccgtcggcagcgcccgatggcctgccgtggagcagccaggcgcatccgctgctgctggccatgctggcgcggctgatgctgccgctgacgctgctggtggcggtctttatcctgctgcgcgggcacaacctgccgggcggcggcttcgtcgcggcgctgatcacatcggtggcgctgctgctgcagtacgttgccagcggcgtgcgctggaccgaagcgcgcattgcgccggactatcgcgccattgccggcggcggcattctgctggcgggtctgaccggactgggcagcctggccttcggctatccgttcctgaccaccgccttcgggcatttccacataccgggcatcggcgaggtggaactggccacggcgatgatcttcgacctgggagtcttctgcaccgtgacgggaaccacgctggtgatcgtatcgcacctgggcgtgcgcaacctgccgccggcacaggccgcggaggacgcctgatggccgcgctctacgccatcaccatcggcatccttgccgcgggcggcatctacctgctgctgcgcgagcgcgtcttcaccgtggtgctggggctgacgctgctgtcgtatgcggtcagcctgttcctgctgggcatggggcgcctgtcgatcgggcggccgccggtgatcgtggcgggcgccagctatgccgatccgctgccccaggcgctggtgctgaccgccatcgtgatcgcgttcggcatgacggcgttcgcggtagtgctggcgctgcgctcgctggggcttaccggcagcgaccatgtcgacgccgccggccagcccgacgagcgcgccgccgatggcggcaagcaggatccgcggccatgaaccacgccgtgctgctgcccatcctgatccccatgtttgccggtgcgctgctgaccgcgatgccggcccagcagctgcgcgcgcagcgcatcgtctgcgccgtggccacgctgttgctggcgccagtggcagtgcacctgctgcgccaggccgctaccggcgagatcgtggtctacgcgatgggcaactggtcggccccgttcggcatcgtgctgcagctggaccgcaccggtgcgatgatgctggccctgaccgtggtgctggccgtcgccgcgctggcggcggcgggagagggcacggcccggcagggccggcatttccatgcgctgttccagttccagctgatgggcctgaacggcgccttcctggcgggcgacctgttcaacctgttcgtcttcttcgagatcctgctgatcgcgtcctatgccctgctggtgcatggggcagggcgggcgcgcatcggcgccgggctgcactatgtgatcctgaacctggtggcgtcgtcattcttcctggtggcggttggcgtgctgtacgggctgtcgggcacgctgaacatggcgcacctgggcctgcgcctggccggcttgccggcccaggaccagccgcttgcggtggccgccggcgccatgctgatgctggtctttgcgctgaaggcggcgctgttcccgctgtatttctggctgccgcgcgcctacgccagcgccaccggcccggtcgcggcgctgtttgccatcatgaccaaggtcggcatctacgcgatgctgcgttgcgatgcgctgatcttcggcggcccgcaagggctgctggggccgttcctgcatgactgggtgttcttgctggcgctgatcacgctcgcggtcggcgcgctgggcgccgtcgccgccggcacgctgcgcgcgatgaccagctacctggtggtggcatcggtcggattgctggccgcctgcgtatcgatgcagacgcaagccggctgggccgcggcgatgttctacctgctcagcaccacgctgtgcaccgccgcgctgttcctgctggccgacgcgctggagccggagcctgggcgcgaggacggggccccggtcagtgcctcgcggctggccgggctgctgtacctggtgggcgtggtggcagcggtggggctgccgccgctgtcgggcttcctcggcaaggccatggtgctgcgcgcgaccccgccgccgtgggtgccggcgctgtggtccgcggtgctggtgtcgggcctgctgctgctggttgccgtgtcccgcaccggcacgcggctgctgtggcggctgccgcatgaggccgagcacgtgccggaagggaatgagtacctagacgaagaccatcccggcgcggcacgcgtgcgcgtgcggcccgatgcgcgcaagctggcctgctgcgcactgctgctggcgggcaatatcgcgctgacggcatgcgcgcggccggtcagcgactatgtggccgacgcggcggcgcagttgctggaccgcgccgcctatctccgggcagtgctgcccgggcagccggggtaagccatgctgcagcgtctgcttccccatccgtggctgagcctgatcctgatgatcatgtggctgttgctgaccaacagcctggcccccgggcactggttgctgggggcgctgctgggctgggccatcggccggctggccgaccgctggctggtgctgggcgcgttccgcctgtcgcggcccgacctgatcctgcggctcagcatccatgtgctgttcgatatcgtgaaagccaacgtggaagtggccatcatggtgctgggccccaccgcgcgcctgcgccccgcctttatcgtggtgccgctcgatgtcgagcacgagcttgccaccaccgcgctgatcagcatcgtctcgctcagccccggcacgctgtgcgcagaactgagcgacgaccgccgcgccttgctcgtgcacgtgctggacctggaggaagaggccgcgctggtcgagctcatcaagtcgcgctatgaaaccccgctcaaggagatcttccaatgcttgccatcgtgataccggtctgcctggtgatcctgggcctggccttcctgctgaccctggcgcggctgctgcgcggacccagcctgccggaccgcatcgtggcgctggacacgctgaatatcaacgccatcgcgctgatcgtggtgctaggcatcagcctggattcggcgctgttcttcgaggccgcgctgctgatcggggtgatgggcttcgtcggcaccgtggcgctgtccaagtacctgcagcgcggcgacatcatcgaatactagggaacgccagatgctgcatcctgttgcggaattcatcgtgtgcgcgctgctgctggtgggcagcgtgttcatgctggtcggggcggtcgggctgttccggctgccggacttcttcatgcggctgcatgggccgaccaagtcgaccacgctgggcgtgggcggggtagtgctggcctcggtggcgtacttcagcttccggggcgatgccagcctgcatgaactgctggtgaccgccttcatgttcctgaccgcgccgatcagtgcccacatgctggccaaggccgcgctgcagcgccagctgccggtggatccgcgcacgcgcggcagcggctggatgccgcgcatccgcgactaggtatggccgcgacggtttactttcgccgcaatgtgtcctacacccagtcaggcgatgccggcatcttccacgccagggcagggggtttcatggacttgcaacactcggacaaagtcttcgcgggcgcgattccggaagtctatgaggccctgatggtgccgatgatctttgcgccatacgctgccgacatggctgcccgcatcgccgcgctgcagccgcgccgggtgctggaactggccgccggcaccggcgtgctgacccgggaaatcgccgggcggctgccggccgagaccctgatcgttgccaccgacctcaacgcgccgatgctggcgcgggcggagcaggccggcacgagccgcccggtgcactggcgcgaggccgacgccatggcgctgccgttcgccgatgccagcttcgatatggtcgcctgccagtttggcgtgatgttcttccccgaaaagggccgcgccttcgccgaagcccgccgcgtgctggtgccgggcggcaccctgatcttcaatgtctgggaccagctggaattcaacgcctttgcccgcgatgtcaccggggcactcgccacgctgtttcccgacgcaccgcccgagttcatggcccgcgtaccgcatggctaccacagccaggccgcgatcgagcaggacctgcgccttggcggattccagtcctccccggtctttgaaaccgtcgcggcaaccagccgcgccagcgccgcccgcatcccggcggtggcattctgccagggcacgccgctgcgcgccgacctggagcggcgcgggccggatgcgctcggccgggcaaccgaccattgcgaacaggcgctcctggaggcttatggcgacgggccattggccggtccgatgcaggcgcacgtggtgatggtaacggcgcccgccggataaagctgcccgccagttggtcgcaggtcatcgctgggcgtgcgcaaatcgccgcttgcgccgatactgtagccaggctcatgacgactacaggacccttgggcggtggccatggactctatgatcatttccgcatcggtggcactgggcatcggcctggcgatcgggctggagcgcgagcgcagccaggccgccgccgggaaagatcgtggcatccgcggcgggcggcctgcgcttcaccgtgccggtcgcgatcggattggtgctgtcgaccagcgccacctgggcagtggcctggctgcagcgcttggattgaggcagcatgcatggtcggctaccatcagcgcggcgcggtccggattcccctggcgcgcattgtcggacgatgactacgatgccccttgtacgcgtgctcgcgatcggtctgctgataggtttgctggcgggatgcgatttcctgcgcggctacgctgagggcgaatccgaggtcatgcgggacttccgggccggggatcgtgccgatgacctcggggcggcgcgctttgtcttcgatgacttcggcggcctgagcaccgatacccttgagaccaatgcgctaccgtggaagctggcaacgaccgcactgctgctggccggcggccccaacgttccggtcactcaggacgccttgcgccgggccctgcgcgagtttggcttcatctatcccgatgcgatccgcaactggccgcgccagcaacagcccaggttcgacaagcccctgggcgtggtcagcggagtgatcggccgggatctcccgaagatccgcctggaagtgtccaacctgggatgcgcatcgtgccatgcgggcatcacctacgacatggacgggcgtcccaccaacgatgtctggctgggcctgccgaatacctccctcaacctcgatgccttcgtcaccgcggtctatcaggcggtgaagcaggtgaaatccgatccggaaaagctcctctccgccatccaccagctttaccccgaaaccagcaacgaggaactggataccatccggaaattcgtctggccgcggctggtaaaacgggtggcggaactcgaagccagcggtgacgagccgctgccgttcagcaacggcgcggccggcagcaccaatggggtcgcggcactcaagttccagtttcatctgctctcggcgggcacggccgccagtggttccacctcgattccggaactgggctaccgcagcctgcgctcatcgctgctctatgacggcgtctataccagcaagggcgcgccgcgctttgcgccagtggcacccggtgccgccaacgatgccgggcggctggcgcatatcgtggccttcttcaccgtgccgaccatgggcatgccaccggatcgcgccgtccgtgcgattccgcaggtggaagacgtcatgcggttcatggcgggctacaccccgccgccgtttccggggccggttgaccgctcccgcgccgcgcgcggccgcgccgtctttgatgccaactgcgcccagtgccatggcagctacagccaggacccagagcgcccgcgccttgtcagcttccccaaccggctggtggcacaggcggatatcgggactgacccgacgcgctggcaagcaatcgatcccggcctgctgcaagccatctcgcgctccgagctgggcaggcatatcgacgcggcaaacaccagtggctatgtcgcgcccatcctctccggcgtgtgggcgacggcaccataccttcataacggctccgtgcccacgctctggcatctcatgcatccgcaggcgcggcccaggcgcttctgggtcggaggccatgccctggactacgacaagctgggcatcgccggcaggctcgatgcggccggtacctggacctatccggccagctaccggccgtggtcgaaacccgtgctctacgacacggcgacggcggggcgcgacaaccgcggccacgagaaggaattctcgacccttgccgaaagcgacaaggatgcgctgctggaattcctgaaattgctctagctgccgtcaggaatcctgcagcagttccgcgactgggagccgggcgctttgcgcaatgccacggtccggcaccggcccgaagcgcatcacattgacgagccgattcccccgcggcaagcgctggctttcggcaagcatggcggcatggccaggtgaatcggccagtgccgacatcggcacgccggcaaagcccctggcagtcatggccagccagaaccggtaccagcggcgcccgatatcaaagctcgtgacctcgggtgcggcatggatcaggacgatccgcgccgcgcttttcacttttgcgctttccgatgtcagcaggcgggtcagcgaaagcgccgagagcagccggagcacacgaggtctcagcgcaattgacgcgccccaggcttcccaccgcgacagtgccatgcattcggccgaaagcccgtcgcgcggccagcctggatcgtgcggtgacaagcgcagccagtggtaaagctcctcggcaaaccgcgggtcattcaatcccgcagccgcggcgtcgtcataccatctggcgatttgcgccgtgctgttctcgctggccagcgtgacgaactccgcgtgggccgcagcgcattcgcccaacgacctgatctgcgccggggtcgcacggagaaacttgcctcgataggcgcggcgcgcgtccacgaaggcggcaaggggatccgggcttgcgccagatgtgatcaggccggatgcggccgggcgcagaccctgggcagcgggagggtagggcaggccggagaccacgggctgcgtgagccccaacccgagcgtcgacaacgccatggccatgccttcccaggccatgcccagggcgatctggttgtcccgcccggtggggtcgcccacggacagccatcgcgcagggtcttcaagcagttcaaccttgtcgccggcaaagcgccagcgcgcgggctggatattgtgcgcgctgggagcgcggccagcctgtgcaagcagggtgagatgctgatcgcgcgtgagcatgtcgctagatggcctttttgaagagatgcagccgatgcagtggcctggcgcccatcttctccatttgcttctggctggcgccattcgaatccgacacccagctgatgcccaggtgcgagtacccggcaccgcgcatcgccgtgagcagatggtgcagcatgacgccgttgacgccgcggctgtggtagtccctgcgcacggaaaagaagatgatcgccgcacgcttgcggctggcgcggaacctgatcagatgccagagcgtggacagcttcaggcggaagccggtggcgcgcagaaacgggttgagatccggcacgcacagcagcaccccgaccggctccccgttgaaataagcggtataggacagccgctcgtcgatgatccacatcatgccggcgcagggaaacaggaattcctcctccgtcagcggcacgaacatcgggttgccggagaaaccatcgttcaggacagcgcatgcctccagcaggcgccggtcaaagccgcgtcgccggatcggcttgaattgccaggcgggatcatccagcagcgcgcgttgcttgttgccgatcaactgctgcggatcgtagctgcgcacgtcgagctcgaacgtgcgcatcggaaagaacggctcgaagccgcatgcccggagcagcctggcaatatgcggcggcgtgtattcctggtaggtgtatggcggatgctcgaagccctcggtgacgatgccgatcatctgcgtgatcgtcaggttgaagctgccagccagttcgtcacagccgttgcgcttcacccaggccgccgccgcgtcgagcagcgcttgcgcgacctccacgtcatcgacgcagtcgaacatgccgaagcagccgcgcttctgagcgtattgctggttggatgcatcgtggatatgggccaggatacggcccacgatccgcccgtcccgatgggcggtgaaccaggtgcggcgcgcaaactgccggaacagcgggttcttcgccgggtccagcgcgcgcgcaagatcccccttcatcggcgagacaaaatgcgtatcgcggccatagcaggcaaacggcgcctcgaagaacgcgtcgaaatcgccttcacgcagcacggttgtcatgccgcctcccgctgcccgagatggcgcgccagccgcaggatcaccgccgcgcgcagctcgccgatcgccgcgttggcgccttgcggcaggttcagcaacaccacctgcgcgggctggcgcgcgatcagcagggcatgggtcatttcatggcgctcgagcaggtctaccagctgttccgcggcctcgacccgatcgccttcccggatcctggtccacgccctggcgtcgccgatcgacacgggctcccgccgctttccggccaggtcgaacagcgcgtcgagggcgtaatcagcaagctccgtgttgccgagcaccacatggtcggcggtttgcggcaggcgcctgagcgaatgcaggaaaccctctggcgtatccagccgggcatggagcagccagcgcaggaacgcgttgccatcaccggccagcgaaacggcgcgaatgcggacaaaaatggccgtcagcagcacccatgcaatggcaaccggcatgctgcgcaggcccgcctcggcaaagcccgggccgggcccgcgcgaagccagcgccatcacgctggccagcacgacggcgaagagcagggcggctgcgatatgcaccagcagcccgcgcacgacccgccgcgattccgacaggttcaggaacacatagacgaatgccagcgccccgagcgcccccaggcgaaccggcacatggccgagctcctcgcggaagtcggtggccgcgagcgggacggccagggccacgaccaccactaccgcccgggccaggcgtgcctcgttgtcggacagctcggcatcgcgcagccacagcaggaaccagccattgcttgcggtcaccacggcgaagcagccaaggaacatcagcagcagcggcgtattgcccgacagatcggtaaagagattgatgacgaagaacaccaccgacacgcccagcgccagcagcttaagccacaacgggtggtggcgccgcaccaggtgctcggcaaacagggtcatggcaatgggcaacagggttgccgctgcaaacaccagttgcgccagcagcgtgccgccaatcagccaggaaaagccccggactgccagcagtgccgtcagcaccccgaacaggaacaggcccgtgccggccccggcctcgcgccgggaccaaaggaaatgcaggcagagcccgcagcccaccgcgccgagccaggtaacggcgacatcgcttgccagggcgtcaatcacgcgcaatcctcatctcgcatcaacctcgccatgaagcgccgtaccagcgcgcgcacggcccatgccgtcagcgcattgcgcggcgtctcgacacgcatggtccagggattgaagaagtagccgcgcacaccggccagccgccgccgaccgagcaccagcttgatcacctcgaacgccatcaggttgccggtggtgatcaccatcggcgcaaacgacatgcgcttgcgcttgccggtcagcaggtccttggcgatgccgagctccacatgccggaccgaactcgagttgaccatcacatattccagttccttgcccaggcattcctgcctgagctccggcgtcagggacttccagtcaatgccggccgtgggataggaaagacgctcctcgggcctgggatcttgcggacggacaaccgtgacggagggcaggggagcggtataggcgtcgatgacggtcgcaccatgctcccgcgccttgcgatagagcgcgaggcccgcggccatgtcatccatgccgttgaccacgatcttgtagcggcccagcaggtcgtcgagcctgtcggtccactcggcgccgaaggtctcgatggcaagttccgggttgatgcgccggatctgcgccacggtggcctcgaccttgttcacgccaacggtatccaggctggcaaacacctggcggttcaggttcgacacgtcgaacgcatcgaagtccgccagcgcaaagccgccaatgcccacccgtgccagcgcctgcaggcaggcgccgcccatgccgccgacgccacagatcagcacccgtgcattgcgcaattgctgctgttccgcgtcggtcacgaaaccgatgttgcgggtcgtgaattcctcgtaggagaacggtggaatcattgactcttcctagcgcgcaggtctcccagcggctcgcgcggattcagccagtggaacaatggcaggacgatccgaccgacagccaggaacgcaatctgataaaggatggcgggcaacgagtcccgaggcacttcccgcaacaggtatttccgcgcgctggccaggtccaggcaggcgacctgcaggaaatcgtcgccgcgctggtaatcgagttcccgccggcagagttcgttggcgcgctcgtcccgatgcttcggcgcctgctcgaacgttttcttgagattgtccgagccgccggtataggcatcggtaatcacgaaccgcgcctcgtcaaatcccgccgccccgtcaacgccaaagacatgccgatgcgatttcatgatctcgcgggccacgctcaggtgttcaaagctgcgccgcgacggctcaaagggattgggataggccgtgacaaagacctcggcgaccttgccgataatcgccggcacctgggtcacattgctgatccagatcgggcgcaggccgcggcggaagaaaagcaggatgcaggtcagcccgtacagcacccaggacagtccttgcgtgcgatagcccggatcgaccatcaccagcccaaggtgaatcgcctcgaccgggcgggccttgacctcgatcggcatgaccgacagcgcattgaacgcaatcggctggccgctgtcccggtcataaagcagcgtgatcacggcccgccgcagcctttcaggatcgccggaaagcaccccgtaatcgaggtccttgccgattccccgctgcacgatgccgcgcatctcggccagcatggcttcgagctgccgggcatccatccacaagccgggccgctcgacgacccggatccggacggaccggctggccttcaggctcaggtccaggtagcgcagccgttgtcgaaaatgcccgatgaatttgaacatgcaggtttggctggtgccttgttcttgtgtcgccggcctgaaaggcaagtgtggcttggagcatataacagcacgtccccggtgtcacgggcgggacaaagcaagcgcaggggggcgggcgttcgcctttagaactccgaggggcggatcagcggcgttgtgcgtccacgacaaccccactttccgctgaggtttccggcataagcagcaatgctaagctcacacgcccaccgacgtgcggccctacgtggtggtaaagaccacgctgaaggatgcatcgggcgctcaggtatggagcacccggtatatctccgctagcgccgaggcaaagcccttcaccggtgacaacggctggttcaaggatgatgcccgcccgctcaggcttgccctcgagcaatcgctcaagcgcagcatcgacgtaatgctgcgcgacgtcggacggcttcgacaaactgtatatcgtggcctcgaacgcgtggaccaacacttcaagctgacgatgatcgccagcaatttgacccgaattgcacgaatactggctgcggtgccgcgaggagcggtgcaatgagcggccaaagcggggctgccgcacggcgccatgctggcgcgcctcggaattggggcacccaattgcatggcatggtaggaattcagcggccatttgcatgttgagtcgtgtttagctgcgctgcgcccttcgtgacggagtgcttttcaacagcctgctagagcgcgacctggaggacgccatcctgcgcgagctggagcattttctgctggaactcggagcaggcttcacctttgttgcttgccagaagcggctgcagattgacaacgacgacttctatatcgacctgctgttctacaatcgccggctcaaacgcctggtggcgatcgagatgaagctgggcgagttcaaggccgccgacgagggacagatggagctctaccttcgctggctcgccaagcagcgcaagccgcaggccatcgaagatccaccagcccacgcccttgtcaacacggcctgggcgccagaagctggccagaataccggccagaaagccgtgcgatacgaaagcaaagaaacgggtgagacgcgttcatatagattgccccatgacgggcgcgctgatacccctacccggggcagtgcagaagatctctggctcggctgggcctcaacttgactttcggagatgctcagccgcggcccatcatgacgcctgccccagcgcgcgcatggtcgccccgaccagaggggccttgagcttgagcgcacgattctctaccagatgccacgacagcaccgcaagcgccagcgtcacgacaccggaagacaggagcaacatcatgactgagatgcctggaaacaaggcgacgatcgactgctggatcgggaaggcgtagatatagatgccatacgaaaagtcgcccaggcggttgtagcggaacagggcaggtaactgaagaaacgctgcaaaaagcaccaggtatggcattgccaacaggtacatcagcgcgaacacatggtgattcggcacgaaggcgctgccgacgacggcggcgagcagcagccccgcgacgggagcggacagttccacgtgcgcgcttaggatgaacaggctggcgcccgcgaagaacatcagcggcaatgctgtcttctgcattgcagagccgccgaggattgcgaagacgcaatacaggaacgaggccgccgtgaccaccagtaccgccgcacggaacgcgcgctggtgagcgggccatgcgaccatggagatgacccatatcgcggccagtgcgaagtacattcggatctcgtacatcatggtccacagcgagccattcaccgtatccggatacggattgatcgcgaatacaccgggcaagggatagactgcgccggcgaccagcgtggtcgtcttcagcaagaactggcgcgttgccggatcgatgaggtatgcagaggccggcagcgccgtgaacaccatgcccaggccgaacaccaccagcgtgaccatgacaagcagcgccggatagatccgcaggaagcgcgcccacaggaactcgagcacgcttccgcgcgtcagcaggcttttggtcacgaggaagccgctggtgacgaaaaacacgtcgacggcaatcgttccgggggtcaccccgatcagcctgcgcaagggctcgtcattgacgtcgccggagaccagtgagtaactgtgggtgacaagcacagcgagcgcggctgtgatccgcatcaggttgaaattgttttcgtcctttcttcccccggcgacgtgcgcgagcctcatatgcccccctttttcattaagccggcctcggttgacggaacgacgccgacagcttccgctagcttccggcaagcatagaccgcagtctgggcagaatcaggcgcatgtccgatagcgccgagggattggcggaatagccagtgaggcgaacggcggtgtcgtatcgcgccgacacggcaaccgttgctgccgatgcgactctcggccgactttcttaccccgcgcatgcgcgcgacgtccgtcaatatccgccaagttctcggcacttccggacaggcggccgttcctgtcagccttagaagctatgatgcaagcggaaaatcgaccagcactggatggaggcggcagcgatgaaacatcccggcaacccgttgaaggccgtgatcgatgctgagccaggcaggccatcgtgaagtcatccctacgcagagcctgcgtcgcaggcaccatgctggcaggtctggtcgcgggtactgtcgccgtattgaccggtagtccgcgagcttcggtccgcgcgttcgccgcggtaggcgcgacggccgatgtatcggtgcagcctgcacccggcggcgcagaccaggcagatagcctgcaggcggcgctcgacaacctgcaggcgggacagcgcctggtgctggcgccgggcacctatgtggtgggccacgtgcttgcagtgcgcggcgagcaggttgtggtatcgggctatggcgcgacgctggtcgccacgaaccctgacgagcaggccatcatgatgactggcgcgaactcgacgctggttggcgtgacgctgacgggcatcggcacgcagcggctcgagtcggccacgtcgaccaaggtcgccgtggacggacagggcatccaggtgctcgatgtcaacatcaatggcggtgcgagtgtcggcatctttgtctcgcgcggcagcagcattgcgctggtcggcaacaaggtccatggcacgctggccgacggcatccacatcacaggcggttcacgcgacgtgctcgtgcaggacaacgcggtcaccgccaccggcgacgacatggtggggatcgtcagctaccagcgggacggtgtgctcagccagaacatctacgtatcgggaaattatctggcaggcaacgcgtggggcaggggcgttgctatcgtcggcggtgccgacgtgacggtcgccggcaaccggatcgaaggtgtgcagaaggctgcggcggtgctggtggcgcaggaggatggctaccgtacggccagcgtgaccaatgtcctggtcgcgaacaatatcatctccgacgaccagaacgcgacacaacctgggaacgaccgtcccgccgcaggccatgcagctatcgacatcaacacgggcagcggagcagtgacgcaggtactggtgacgggaaaccaggtaacgcgcgcgaggttcgacggattccgggccatgaacaatgtttgcggcgtccgcgtctcaggcaaccgctttgctgcgatcggtggcctcgccctgtcgctgcagtaccgaaactgtacggcgacgcagtttatctgcgacgccaatacgctcgatggtgtgagcctcgcagccccaccaggatgttccagcgcgggcaccatcccgatttccggcgcggacgcgggccgcctgccgccggtgcgtacctccctgcgccaaggcctgcaggcctcgatgccagcgtgccaggcacgctcgggttgagggaagcccacgcacagcgcttcgcccccggttggcgcaatctgcgcaagatggtcacctgacccgcggcgtttccgccaacagttgcagcaagtatctgccgtagtggctttttacgagcggggaggcgagccgactcaactgctctgcatcgatccagcgatgacggtacgcgatttcttccgggcatgccaccatcagcccctggcgcttctgcaacgtggagaccagcagcgccgcctcgatgagcgaatcatgcgtgccggtgtcgagccaggcatagccgcggcccatgatgtcgacgcttagcttgcccgctgcgaggtagcgcgaattgatgtcggtaatctccagttcgccgcgggcagatggccggatatctgccgcaatgtcgcacacctcatggtcgtaaaagtacagaccggtcaccgcatagctggaccgtggcgaagcgggcttttcctcgatcgacaatgcgcggaagtcttcatcgaattcgaccacgccataccgctcgggatcgtggacgtgataggcaaataccgtggcgccttcctcgcgtcggctcgtccgggtcagttgtctggcgagatcgtgcccatagaaaatgttgtcgccgaggatcagcgccgatggatcccggccgacaaactcacgtccgatgataaatgcctgcgccagcccatcgggcgaaggctgttccgcgtaccggatgtcgagaccccactggctgccatcaccgagcatgccggcaaagcgaggggtgtcctgcggggtggaaatgaccagcacgtcgcgaatgccggcagtcatcaacgttgacagcgggtagtagatcatcggcttgtcgtagaccggcagcagttgcttggaaacgctctgcgtgaccggatacagtcgggtgccggatccaccggccagaatgatgccttttcgggtcatgcctgaatctccgtcgtggatggtctttcctgtatcttcaggatcgatgcgctggaagctgtttcgcggcgatagcagaccgcgaaggccgcggctccgaacgcttcagtcaggatgacggaaatcaccgtcccttcggcgcccaggtaccacacaagcgggaccacataaacgagatggagcaacgtcgccgccgcgtagatgttctgcacgaggcggtggcgccccaacgcgagcaggccaaggttgccgaaaacaaaggcaatgctggtaaccggcagcagcacgccctccagccgcagcaagaagatcgcggcgtggaacggttcgcccagccacatccggatgccaagatccgcgaacagctcgatcgcgatgaacatcgccaccgagctgccgaacaccgccagcatggccttgcgcatcagcgcctgcgctgcggcagcatccgtggcgttgtactggctgatacgcgggaagaacgcggtgccgatgacggtaaagacagtctggcccgcaatgcggatcttgtccgccatggagaattgcccgaccgcgaccgggccgtggaaataattgagcaggatcgcgttgaagttcacgtagaagctgaccagcacaagggaaaggaacactggatacccctcgcgcaaggacgccacgatcgcgcgcattggcacggcgaccagcgtggcaatgcgctgccggtgcacctcccatagcgctgcggcggccaggatggcagtgccgatgctgatccccagcgccgccagcgctgcatcgccgggcccccgaacccacgcgatgacgcatgaaagactgaccgccttggagatgaaatttggcagcacgagcgacttcatgcgctcctgcccctggtacagccagaacggagtgatcgcgttggcgacgacgcctacgaacgccgcggccaggatctcccagtgctccctcaagcttggcaccatgcccaccgcgcccagcatgagcagcgccgacacaagggtcaacagcagtttggcgcccatggtggctgagtacacctcggctaccgcttgcggatcgtcgcgttgcagggacaccaggcgggtcgccgtgagattgtggccatagtcggtcagcagaatcaggtattgcgccagcgcctggcagtaggccaggacgccaaactccttgacgccaagcactcggcccagaaacggtaagagcagtagcgggaacaggtagttgcctgcctggatgaggagaaggtaggcagcggtcgcacggatcgatgggggcatgggcttgttgatatatggagacgtcatggtgggcccggtagcggggcgctgcgcctggcatggtgcgggggcaccttgtgcgagatccggtgtcgggccggctgaccgaagcattggaagaccagccaaagcagcgcgagcggcacgaagttccgcccgctgaacaggttcggcacgcgcagcatctccatcagcgacaccagcagcacggcatgggcgcaacaccagaagccatcgcccgccctccagccggcgtagctgcgtgccagcatccagcccatgagcgctgccagcagcagtgcgaaccatccccactcgtagaagtgcacgaagataccggacggattgttgaactcgggatcgccaaagttattcagaaacagcccgtagccgttgccgccacccactagcggccggaaaaactccccgagtacgggaaatctgatgagccagtcgaacgtaaaggttggctcgccggttccccagcccatgatcgtcagcaggccagcgccgttgttcagcgcggtcgagtaatacatcgccagccgctcaagggcgaagtcgaggatgttgtcgtagatgttgacgtagtaggtttgccaggagcggctgtattcgttcgcgatgaagaagccgatcatcggcacgatcgcggcgaagggtcctagcgcgagcagcaccgagtgcctcgggaggttgctgaagcgggcagccatcagggcccagggaaggagtacctctaccagcgcgagccgctcggcaaaaatgaagctgcgcaacaacgtcagcacgcccagcacgaccatgtaggccttgtaacgattgaagccgcgcacaggcgtgcggaagacatagaagtacagcggcacgtaagccacggtggcttgcgtgagcgtgctgatgccggcaatgcggcccttcagttcaaggacgtcgtaggtatttgctccgccgttcaggaaggacaggaggatggcaggttgggcgatcacgccgcccatcatgaccaggtaaccggccagtgcgaggccgaacatggcatcaaggactcgtaccggaatttcggggggctcggcgcgggcgggcggcacgaggatacgttcggcgtatgccgcgacggtgagtacaccgagaaagagggccccggcaagagcatggaagctggtgaagtagactcgctcgatggccttctgttcgccaagcaggtccagtgcaatcagcatgtatagcggcaggatgaagtacagcagtagcctggcggggtcttcccaccaatagccttcatggtgatcgggcgtgttgggcatcgtagcggctccgtcagcgcggcagcgattcgagcgtgtcggcgatcaccggcaccggcaacgctgccacgtcgcgctggatgtcagccgaatggccaatccctgcgagcggcgtggtcgatgcctgcgccatcgcgctgcgcaccatggcgagaaactcccgccggaaacgctcgggtgagaactggagcgcattgcgccggcatgcggcagggttgaatggtccgctctcctcgaatcggcacacggcgcgcacgatgtcttctacggtctggcgcggaaagaagacgccggtgcggatattacggtccaggctgtcaatgaccgtctcgcgagaaccgccccgtcccagggcgatcagcggtgtcccgcacgcctgcgcttccagggccacaatgccgaaatcttcttccgctgcaaagacaaaggcacgggcgcgttgcatatggtcgatcagtacgtccgtcgactgatagccgagcagctggacgttggagggcgccatgtcccggatgcgtgcgagatcaggaccggcgccgatgacaaccagacgtttgtccggcatggcagcaaaggcttcgacgatcagcccgaccttcttgtacggcaccagacgcgatgcggtgaggaagaaatcctcgcggcgatcgcccaggctgaaccgttcaatatcgactggggggtagatcaccgaggcatcgcagccgtagaccttgcggatgcgacgcgcgacgtaggcggagttggccacgaacaggtcgacaccgtgtgcggtccggtggtcccagatccgcatgtaatgcaggatggcgcgggccagccagctcttgaggccacgggtcaggcgggattcttccaggtattgatgttgcaggtcccacgcgtagcggatcggtgaatgcacatagctgacatgcagctggccggggccggtgatcacgcccttggccacggcatggctggacgagatcaccaggtcgtatccggacaggtcgaactgctccaccgccagcggcatcaagggcagataggcgcgaaacgactgccgggcgcgcggcaggtgctggatgaaggacgtcctggcatgcttgccttgcaggacggcccgctctgcgtccgggaaaaagtcaaccacgctgaacaggtcggcatcaggccagatcttcagaatctgttcgaggacgcgttcggagccggcgtaggtagtcagccactcgtgtaccaccgcgaccctgccgaactcgtctgcggtgcgcaatgggggaggattcatcgccgtgggagccatggagtgatctcgctaagtagcttggcggcagtggtgcgccatgaattccgttccacgtgggcataaccttgcgcgcgcaatctgtctcgcaaggtgctgtcacgcatgacgtaagtcagcagctcgccaagttcgcgagcgctggtcgggcggaaatagagcgcggcgttgccgcaggcctcgcgcaccgaaggcagattggacgcaaggaccggacagccaagcgtcatggcttccacggggggcaagccatagccttcatagagcgacgggaaaacaaagcaggcagcatggcggaacaatgccttgaggtcgtcgtcatcaacatagcccacgcgtttgacgaaatctggcgctacctgctgcaccgactggaacacgggcaacgtggcccccacgatgaccacttcgtattccgtcgtcttgagcagctcgatggcctctaccacgagcctgaagttcttgtggtggctggcactactgacagccaggacgtagggccggcccgatagctggaactttctgcggacgtccggggcttgcggcaggcgctgcatgtgatcaccgctcattggcagcacgccgatcttgcggtcgggaatgcgataggcctgggagagttcgcggcgtgagaactccgacacagtgagcacacgccgcgcgatgcgtccgacccacggtgccatgatgcggtaccaggcgcggaacgcgcgtgtgtaggcttgcggaatccgtactggcgcggcgtcatgcatgactgtgacctggttcggaaacagcaacggcgccgcgttgcaaaggttcagcagcagcgtgccgcgggcagcgagcgccaggctgacctgctcccagtattggcccgtgccgccatggaccgtccggatccgcaagtgcgggaactgctgtggatccaccttgacggatgccggcaccagaatctcgaacgacagcccggcagtaatagggtcgtggtccgcaacgagttggtcgatgccgcgtacgacttcgtaggcaaagcggtcgacgccggtcgcgcgcctgcccaggaagcggccgttgatggagacggttgcggaggcggacacggtggccatttccgatacggttcagtaccccgcacgggcgaggggattggcgatgtagcgaaccgcccgattgctgatggatgccaccggcaccaggcaaagtgcggtcaggcaccatacggcgagcttcttgcgcgcgctccagaagggattggcggcaaccgtatgaaagtagcggctggactcatgacggaaccagcgccatcgccgagtcaacggcgcgccatggagaagggtggcaaagtgggccttctccgcggagaaatccagaaattcggcaggcaggacgacgccaagccgttcccaggccagcccgcgcaggatggcccagcgccgggcagactgcctggctcccgccagtgcatcttcggcattggcgagcgacaggttggcgctgcccgcatcgcctgcttgcgccgtggtatgccgatgcacgcgatagcggccgagcgcacgatcaagcgagccaacgctgccgaccagcgcaatgccatagatggcgtagaagtcggcaccgtgtatgttgtctgcggtgaccgggacaggaaagatgcgccggagtgcatccacgcgataggcgtttcccgacccgggcggtgacgggtacagccatccgtcccgcagccgcatgccgcagtctgtcacgtcgctggattgcggaacctgcaccccggtgagggtcccgtcctcggtcattacctccagtcggaactgaaccttgacatagtcgccggctgcgaaggcggccagcaccgcctcggcggcgtccggctgcaactggtcgtcggcgtcaaggaagatcacgcagggcgtatcgagccgacgcagcgcgtgattgtaggccgagacctgcccgccgtttggctggaacacggcttctatcctgtcgccgtagcccaggatgatgtcacgcgaaccatcgctggagccgtcgtcgatcaccattaccctgacccctggcgccgtctggcatagcgcggagtcaatggctccccccaggtacggcgcgtagttgtagttgcagatgacgatcgtcagaagggcgggggaggagttggtcggcatgacggcctctgcggtggatgttggctacagggaatagtcggcgtgcaagccgaggcggcatgcctcgccgtcggcgatcgcgcgctccagcagagcgagcctggcagcagcaccatgacgtctgccgtagatccgcagcagggcgaggaagacgaggcggttcaggcggtatgtcaggctggaggtcgaccagtagtgcttgtcgaaccatgcctggttgcggctgctgtagtaggcgcggaagtccgaccggctcaacagcaggcactcgaaatgattcttccagtctcgcttgacgttccacgatccctccaggtcttccaggcgggcgccggttaccagcgcaatgcggccgccgcgcgcggtcaggcgccatgtgtattcgatgtcgtccgcatacagcacgagctgccgttccggcaagccgagatcgaggtagagatcgcggtgcccgaggaagccgccatacggcgcaaaaggcaacggcaggacttccggcatgtccgtcggcttcgggcggccccacggcgtgcggcgccatagcttgtagggaatgcgggccacatgaaagccgaagtagctggagcgcggcggcatcgccagcgccacaggcacacccatcgcgatatcggcctggtgatccgggcggaagccaagcaccgccgcacggttgcggccaaatccgcgcgtcagccgatccagctgatggcagaggacgtcgagtgcgccggggcacggggcattgtcatcgtccatcagccacaggtagtccgtgtcgcggctgagcgctgcgtcgatgcctacggcatagccattggccgacccggtgttggtcggcaaccggatcacggtaacccgcgcgccccagtcgtcctcgagccggctaaggtcggacgaggaattgttgctgacgatcacagcgtgcgccacgccctcgtgctcgaacgcccgctgcaagagttcggcgcaaaagtgcaggcgcgcgccgtaggttacggtgaccaacgtgatgcgcttgtgatgggtgtatttcataactgccttttttctgctgattaccgctcatttccgctgatcatgcaggcgcgcccgggcgggacgcgtcggcaccgtaggcatagctgtagcggtgcaggtggccggtgaagtcgttgaagatcacgccccgtacggcgacgtcggcctgcgccagccggcgcgtgctttcgtcgatctgttccaccgtggtgacccggtgccgtgccacgatgaagacagtgcccgccatgcgtcccagcacaagcgcatctgccaccggcagcaatggcggtccgtcaagcaccaccatgtcgtactggccggcaacgcgttgaacaagtgtggtcagttctggctgcagcaacagctcgcttggcccggacatgtgccatccggtggccaggaaatcgagaccgtgcgatacatcgtggcgaagcacgtcctcgtaccggctcgtaccagcgatcacctcggccagtcccggaccgcggtccacatggaatcgcttgtgcagcacgccattgcgcaggtcggcgtcaatcagcagcacccgccgcttcgaggcacccgccagcgtggcgagattggcggctacgaaggacttgccaaccccgcccgtagggccggtgatcagcaccacacggttgggtgcatcgttcaaggcgaagtgcagcgtggtgcggacggcgcgcaggctttcgatcgctgcatcgggcaacaacgtgcggtctgtgctgcccgcgagcatgcggggccaggcagggcggaaatcggaagtcagtcggctgcgcggcaccgtggcataaaccggcagccccgtgcctgcctcgatctcctcgcggtcctggacggtacccgccacgcggcggcggaggacggccaggaccacgcctgccagcaaaccggttagcagcgaaccgcccactgcgacgccgcgccgcggcatgatcggcgtctcgggtggcgtcgcggggtcgatcagtcgcacattggcgaccttgccggcgcgcaccagggtaagctgctggcgggcgttaaggcggctcgtgtagagctcggtgtccacctgcatgttgcgctgcaattgcaggaccttctgctcgatcaggggcagtctgcgcgtacgcgcctcgatgacagagagctctgccatggctccctgcaactggccgtcgagtgccagcagtgcgggatgcttgtccgtgtaacggatggacagttcctggcgcttctgccgcaggtcgacgacgcgcgtttcggcttccacggattgctggagcagggcgcgcgcctcctggctggtgtccacggtgccctgttgcgcacgaaacgcgttgtagcggctttccgattcctccagttgccgcttgagctgcggcaattgctcatccaggaagcgaatggatttgtcggcctcttccgagcggcgtcgcacgttttgctcgacgtactccttgcccacctcattcaggatctggctggcgcggaccgggtcgacgctgtccagcgccacgccgatgatgctcgattgcttgccgcgttccccgatggccatggtccgttgcagccattcggtggtggcgatctcggagtagcgcctgatcgaaaagctcgcgcccggctcgccgtcggcggcgcggaccagcaggtcgatcggtccatgcagggtttcggcatgtagcggcataccgaccttgccgtgaagcattagcagcggcgcgtcccacgagccgggcagggagaggacataagcaccctcatgaccgagcgtcagcacgaaggccttgccctgctgggaagccggcacgtcgaacatcgccacgtcgatgcgttccgcgccgtacacgtagccaccgagcggatgcgacaagccatccgtgcgcgcggcgagccaccacccaatcaccggcacatagcggggaccggcctcgatatacagcttgagcttctcgaccgcgcgtgataccaccatgcgcgagttcagcacctggatttcagaagtcgtgtccggcttgatctcggaggtcagcttggggtcatcggacgtggaccgggtcccgatggaactgggttcgacctggatcagaatgtcggagcggtagagggggcgcgtgaacaacgcatacgcgattccggcgagcaggcacacggaagtggcgaccacgatcagccacctgccggcgtacagtgtcgtcagattgttcagggctcgggccggtgcgcgaccgggcagttcatagaccgggttcgcgatgtaagggctcttcatgccgcactcctgcgtgggtatcgatcgtgcataggcgctgatttcacgggacaagcgcccggccgacggtcgcagtctgggcggtgggcaacagcaggttgacaacgcggctccagcgaaccagcgccgacgcatcgacgaacaccacatcgttggcctgcagcgaaaagccgtctgccaacgccatcgccgatggcgtactcgcgtcgaggtggtacaccactggcttgttgccattgtccccacgcacgacatacacgtgtcgcgcgtcgccagagtactggctgacgccaccggcatcgccaagcgcctggttcaggctcagcttgccgttattaagcgtcagtgtggacgcccgtgccacttcgccaagtacgaaaaccttgctgtcggtggcggcgtagaaacgtaccaggtcgccgtcgcgcagcaggatgtcggatggattcccgcccttggcgatgaggtctggcaggttgatgcgtacggtcttgtcgccacgtgtcagggccacccaggagcggtccgctgtcgcggtgaagccaccggcgcgattgatcgcctcgggtagggtcattggcacatcattgatgatctgcaggccggggctctgcacggcgccgtccagatagacgcgcttgctgcgatatgcctggatgcgcagggtgatctgcggattgcgcacgtactcggacaggcgcctggcgaggagctcgcgcgcatcagcctcggtgaggcccgctacagggaccatgccgacgaaagcgaactgcaccatgccgcgagcgtccacggtatagccggttaccaccgcgttggagccggcagtatccacgccgctagtgacctgcagcgccggcatgttcagttccggatggccccacaccacgatgctcagcacgtcgccgggccccaatacataggcgcgtggcttgtcgaacagcgcgcgaacctcctgcggcacaccctggggccgggcggcttgctgtgcatcgatcagggtgccggtaatctcgaccaggttgtcgggagtgaccgactgcacgccttttatcgatggcagctcgggtacggtccccacggacgacggctgcgtcgcgcgagcggcatcgggcagaggaccggactgggactggaacgacatccccggcgccatcgtgcaggcgccgaggagggccgccaggcctggcagcagcgtcgccgccaggatccggccacgcagctggtcagtacgcgccgcggccatgcaggaccaccccgatcgtcttgaacaggattccgatgtcacccaggaacgaccagttcctgacgtaggcgacgtcgagcgagacgcgcgtcccgtaatccgtttcattgcggccactgacctgccaggggccggtaatgccgggaaggacgcggaggtaatacgccgcagcgtcgccgtaccgctcgagctccttctcgacgacggggcgcggaccgacaaggctcatgtcgccgcgcacaacattccacagttgtggcaattcatcgatgctggtacgccggatgaagcgcccgagcggggtgacccggacatcgttcctgagcttgaaatccttttcccattcggcgcgcgccgccgggtcggtcgccagcaattccttcagcacggcgtctgcgttgagcaccatcgaacgaaacttcaggcacttgaacttcctgccatccacgccaacgcgggtgtgtccgaacacgcagggtccgccgtcacgcatcaccagcattgccaccatggccagcagtggcgacagcagcagcaacagcgcaagcgctgcagcgacatcgaacgcccgcttggcgcccagtcccagcggtgacggaaatcgcaggtccacgcctgctggcaacggctgcgagggcgccccgaatgccgccattgcgccggacaagccggtctccatgcccggcgcggcagcagaggccgcggtcaggcggctggggacgataccggatcttgcaaagagtgatttcactgtaaacatgacgacgctccatggtagaggttggactgcagtcgatctcccttggcgctggctgcggctgtcggacggccgtcagccgcagcgcccgtaggtgtcggcgatgcggacaatgtcgtcctcgccgagatacgcgccggactgcacctcgatgatctcgagcggcagctttccggggttctcgagccggtgcgtcacgccgatggggatgtaagtggattcgttctcgctgagcaggaactgctcgttcccacgcgtgacccgcgcggtgccgcggaccaccgtccagtgctccgcgcggtggtggtgcaactgcaaggagagagcggcgccgggatgcaccacgatgcgcttgacctggaagcgctcgccatggtcgagcgagtcatagctgccccatggccgctgaacctttcgatgggtctcggcctccggcccatgctggcgcgcgatgcgctcgaccaggcccttgaccgcctggacccgcgagcggtccaccaccagcacggcatcggcggtttcgaccacgatcagattgaccgtacccacgcaggccaccagccgtccctccgaatgggcgtagcacgaggaggcgccctcgaacatcacgcggccgcgcgcggcattgcagtcgtcgtccttgtcgatggcatcccatacggcatcccaagaaccgaggtcagaccagcccgcctccagcgggaccacaacgcctttgagcgcgtcggcgcgcgccaggtgctccatcacggcatagtcgatcgagtccgatggcacctcggtgaacgacgccgcgtgcggataaaagaacgcgccgtcgctgcggccggccgtgcaggcgctcacgcaggctacgtgcatcgccggctgaagctgttgcagcgcggtcagccaggtgctggcgcgcaccacgaagatgccgctgttccaccagtattcgccggacgcgaggtactgcgccgcaagttcggcggcgggcttctccacgaacgcgtcgatccggcgtgccatgccttcgagctgcgcaccgagccggatatagccgaagcccgtgtcggcgcgcgtaggcggcaccccgagtgtggcgatggccccttgttctgcaaagcgtgccgcgcgcagtacggcgaggcggaacgccttgccatcggcaatcacgtggtccgcgggcatggcgacgaggatgctgtcgttgccctgctcgcaggccagcagcgcggcgagcgtcagtgccggcgccgtattgcgcccgactggctcaacgacgatacgcgcgtccacccctgcctcggccagttgctgcgcagccatgaaacggtgtgcttcgccgcagacgatgatcggcgcggcgtcagcgctggcgctgccatggaggccggccaggcggcgtacggtggtctgcagcagggaatcgcggccaatgatgtcgatcagctgcttgggaaagtgcttgcgcgacaggggccacaaccgggtgccggagcccccggcaagcaccaccgccgcaagccgcatgcccagggcgggcggcgatgcccggtcctgcccggcgagcgcatcggtggcggtgtcatccactacatccagcgggtccgttgtgcgcatgatctgctcctgtccggcgtgggctgcagcaaggaaacggggaagccgtctttgttgcagcgaagcatagacgcgccgaaaagcctcagaagcggactggcggaaaatgcagaatgattggccgattaacctgaaaatccattatcaaaagtaatgcgcgagccacctatagctacgggagaaaatgctgaaatatatggaatggcaacggcgccacttggaattcggtcgcaatgcccataattctggcgatccgttactttctgtaacgacttgcccaatcccagtgcaggggccactctattggacattcagtcattatctttgccgaatttaaaatcccagaattagggaaagtggctcaaatcagatacatcacatgattggcacgccgcatttttgcagaaaaccaactagtgccaagtaatgatccgccaacatagcggaactttcagccagtcgaccctgcgcggcgtccaattgccgttatgatgcaatgcaacagatttgatttttggattggacgcaagggggtagtgatgccatggagcaccttgtcgatatgccgccgccggtccggtccctcggtccgctaccggtagccggccaacgggaaattcagcgcatcgggttgctgttgtttgaaggctgctcgctgctgactgccggcatcatcgcggaagccttccgcgtggccaacgaactcgaactcctgcgtcgcaggcgacctgtctaccagctctccctcttgtcttaccgcggcggcaatgtcgcgtgctcctcttccatccggatctggacgcagagcctggacgcgctgggtcagcgaggcttcaatgcgatctttattgcctgcagcgagcgcgagccggtcgttgagcgcgatgcgcggctcatgaccgccatgctcgagatcagcgcaatggtgctggagcgctcccgcgcgggacgggagccgatcctgccccgcgtctcccgggcacatccgctgcgtatcgccgagagggacaacgtcgtcggcaccagccatgccgcgccttccgtattctggtgccggggaggcgtggactccgctccggacgtcatgccctcggccgtcgatatggctctggcacagatcgagtcggaccttggcttcgtcatggcccgggaagttgcaaggcagctcgcgccgcaacgggacatgccgatggtgcgcccggatgccgaggaagctggcgacgcgcccgacatcgcatcgtccgaaaccaacgaaaagattcgcgcgtcggcacggtggatcgcggagcattacacggaggcgatctcggtggccgacgcggcgcgcgttgccgccatgagcgagcgcaactacctgcggcgcttcaagtgggccttgggcgtgacgccgtcggagtacttgcttcgcgcgcggctagacatgatttgtcggctgctgatggaaacggacctgccggtcgacaaaatagcgcggcgctgcgggatgggaaacggagaccggctcgccaagattttccgcaagcgcttctcgctgtcgcccacggcgtaccgcaatcagggcaagacaaagcagtgcgagacaacctagctactgggggagatctgagcatgcgccacgacctgctggatgtcgcgaaacttgagtggatgtcgcgtgaattgtcggaaacctaccgttgcgccgacccgtttccccatatctgcatcgacaactttcttgacgaagacgtttatcggaaagccagcgatgcgtttccaggcgccacggagcgcgtctggttcaagtttcactcggccaccgagaacctgaagctgcaaagccaggacttttacgccatcccgcctgcgctgcgggcgctgatcatggagttcaatgcgcccggattcacccgcttcctggagacgctgtccggcatccaggggctggtgccggaccctcacctccatggcggcggcttgcaccagacgctgcctggaggccacctgggcctgcatatcgactacaactaccatctcgaatggaagcttgaccggcggctcaatgtgctgctgtatctcaatgacaagtgggaggacagttgggccggccatctgcaactgtgggacaacgaggtccagcgctgcgtgcggaagatcgcgccgatcggaaaccggctggtcgtcttcaataccaatgagtgctcatggcacgggcatcccgaaccccttgcgtgcccgcgaggcgtcacgcgacggtcaatcgcgctctactactactccaacggccggcccgagccggatgctgccgatgagcattccacacgcttccagacgcggccgggcgagcggtacggcttaaccgcacgggacatcctgcatggcattacgccgccttatgcgaaagcgttggccaagcggattgtcgggcgatagcgggggccgcaaatcttgcgatggagggatcatgccacgatacggccaagccgctatcacaaggccgcaccgcgctgacgggggcaagagcacgtcatatatgctcgtcaccggcggtgccggcttcatcggcgccaactttgtcctgaattggctgagccaggatggcacggacggtatcatcaatgtcgacaagctgacctacgccggcaaccgcaacaccctggcctccctcggaggtaacgcccgccacatcttctcgcagactgatatctgcgatcgcgccgccctggacaagctgttcgccgcccatcagccgcgcgcggtggttcactttgccgccgaaagccacgtcgaccgctccatccatgacccggcggagttcatccagaccaatatcgtcggcaccttcaacttgctcgaagccgcgcgcacttattggggaggtctggacgccgccgccaaggctgccttccgcttcctgcacgtctccaccgacgaagtgttcggatcgctgggccccggcgatccgcaattctcggaaaccaccgcatatcggccgaatagtccgtattcggcctccaaggctgcgtcagaccacttggtccgggcctatcaccacacttacgggctgccggtgctgacgacccactgctcgaacaattacggtccctatcactttcccgaaaagctgatcccgctgatgatgaccaacgccttggctggaaggtcgctgcccatctacggcgatggcctcaatgtgcgcgactggctctacgtgggtgaccactgcgccgcaatctgcgcagtgctggcacgaggccgcgtgggtgagacctataacgtgggcggctggaacgagaagactaacctcgacgtggtccacaccctgtgcgacttgctggatgagctccgccgcaaggctatcggctcctatcgcgaccagatcaccttcgtcaaggatcgcccgggccacgaccgccgctacgcgatcgatgcccacaagctcgagcgcgagctgggctggaagcccgccgagactttagaaaccggcctgcgcaagaccgtgcagtggtacctggacaaccaagcctgggtgcggaacgcgacgtccggcgactaccggaactggatggcgaaccaatatgccgaataaagcgatcagcgtccccacgttcttggtgaccggcagcaatggccaggtcggcttcgaactgcgtcgtagcctggccccgctgggccgtgtcgtagcattggatcgaaccggctgcgacctgtcatgcccggacgaaatccgccgcatggtgcgcgagtaccggcccgacgtgattgtcaacccgggcgcctataccgcggtggacgaggcggaaaccgaacccgatctggccttcgccatcaatggcacggctgccggaattctggcagaagaagccaaggcgctcgggagcctgctggtccactattctacggattatgtcttcgacggcaccaaaaacgggacctatattgaaaccgacctggtcaatccactgtcggtgtacggcaagagcaagctcgccggtgaacaggccattaccgccaccggtgcacagtcgttaatcctgcggacctgctgggcggcaggcgcccatggcggcaatttcgccaagacaatgcttcgcctgggccgtgagcgcgagagcctacgcgtgattgccgaccagtttggcgcacccaccactgcaacgctgattgccgacgtgaccgcgcagatcgtgggacgacgctggctgtgtggcgaccgcatgtcgttcccctccggcctctatcacctggccgctgccggtgaaaccacttggcacgcctacgcaacagaagtgctgcgctatgccgccgcccatggtatcgagttgaaggtcgatccggggtgtatcgagccgattcccgccacggcttatcctctgccggcgccacgcccggccaactcgcgcctggacaccagcaagctgcgccagactttcgatatccaccttccagactggcagcagggcgtgcatttcctactggaccagattatttcctgagcctgcttaccatgcgcaaaggcattatcccggccgttccggcacccggcgctatccgattacacgatcggtatcgaagcaattgctgccggtctccgacaagccgatggtctgttatccgctgcccactctgatgctggcagggattcgcgacatcctgatcatctcaatggagcctgtcaaatgagcttgaacgttattcaaactgacattcccgaggttttgatcatcgaaccaaaggtgttcggcgatgatcgcggcttcttttatgagagcttcaatgggcgcttgtttgaggaggcaaccggtgtcaaacgaacctttgtgcaagacaatcattcgcgctccacacgcaatgtattgcgcgggcttcactatcagatcaaacatccccaaggcaagctggtgcgggtggtggtgggccaggtgtttgatgccgcagtggacctgcgcatgagctcgccaaattttggcaagtgggttggtgtcatgctatccgcagagaacaagcgcgagctgtgggtgccagaaggcttcgcccatggatttgtagtgatatctgaatatgcggagtttctctataaaacgacggactattggtatccggagcatgagcgtagcttgctctggaacgatacgcgagtaggcatcgactggccgatccatggcgaacctgtcctcgccgccaaagatgccgccgcgagaccaatcggacatgctgaactgtttgcgtagggaactcagaagcggcagatgacttcgatttcggagacgagcggccggcgaggcttcaaccgatcttaacgagacatatcccatgcaagttagcccttccatcttcaaagcctatgacatccgcggcatcgtcggcgaaaccctcgcccgcgacgtggcccgccagatcggcctgtcgttcggttcggctgctgcggaagccggcgaaaaggccgtcgtagtcggccgcgacggccgcctctccggccccgacctcatcggcggcctggtcggaggcctccgtgccgccggcatggacgtgatcgacctgggcatggtcgccaccccgatggtctacttcgggaccaatgtcgagctgaatagcgtgaaagccacttccggaatcatggtcaccggcagccacaacccacccgactacaacggcttcaagatggtcctggcgggcaaggcgatctacggcgagcagattcaggcgctgcgccagcggatcaaggccggcgccttcgcgagcggggccggctcctaccgggaagtggatgtgcgtcagcagtacctcgaccgcatcatcggcgacgtgaagctggcacgccccatgaagatcgcgctggacgccggcaacggtgtcgccggcgccttcgtgggcgacctgtttcgtggcctgggctgcgaggtgaccgagctgttctgtgaggtcgacggccatttccccaaccaccatccggacccggcccacgtcgagaatctgcaggacctgatgaagtgcctgcgcgagaccgattgcgagctgggcctggcctttgatggcgacggcgaccgcctcggcgtggtgaccaaggacggccaggtgatcttcccggatcgccagctgatgctgtttgccgaggagatcctgtcgcgcaaccccggcgcgcaggtgatctacgacgtcaagtgcacgggcaagctggccccgtggattcgccagcatggcggcgagccgctaatgtggaagaccggccattcgctggtgaaggccaagctcaaggaaaccggcgcaccgatcgccggcgagatgagcgggcacgtgttcttcaaggatcgctggtacggttttgatgacggcttgtacacgggcgcgcgcctgctggaaatcctgtcgcgtcatgctgaccccagcgccatgctgaatgcgctgccgaacgccaacaatacgccagagctccagctcaagtgcgccgagggcgagccgttcacgctgctggacaagatcagggccaacgcgaagtttgagggcgctcgtgaggtcatcaccatcgacggcgtgcgtgtcgagtacgccgatggcttcggtctggcccgtccgtccaataccaccccggtggtggtgatgcggttcgaggcggacaacgacgccgcgctggcgaggatccaggctgaattcaaacgtatgatcctggccgagaagccggatgcgcggctgcccttctgagtatgtgcttgcccattgaacatggcaggcttgcgcacctgcgccgatagcaagggctgtatgaggcttccttaacccatcttcttcaacctgaaaaatcctcatgtctgagtcactgctgctgactggcgccaccggatatatcgcatcgcatatgtgggtggcgctgcttgacggcggggccgatgtcatcggcctggataatctgtgcaacagcaatcagatagtggtcgagcgaattgccgcaatttcgggaaaaaccccgcattttgtcaaaggtgatgtgcgcgaccgcgcgctgctcgaccgcctgtttgcggagcatcgcatcaccgcagttcaatgcgtacccgcaacatagtggttccttgcttgattggttcaccggatggacacctttatgcgccgtgccttccgtcgtgacactgaaggcggccaaaaaagggggcgcgaaggcgttgctactgggcttgctccatgtcgtcaagcttggctcgaagtgtttcgacgagccagcagaggaaactttcccatccttcccgagtaatggctaaacccttgccaccctcgaccagaacgcaggttgagagatctctgtctgtaagctcaggccggagcagtagccaacgagcaaggatgctctccaattcgtacgggacgtcgtgcaggtaaaggtaggagccgacttcagtctcgacgtaaggaagcccggccggcagccaggccgacaaaagccgcattttctgttgcagtgacatagcagatctggctaagacgccgttccgttcccatctgtgatggtaaagcggattccagtgggcgagtcagaatgttggccgaagtgacctcagtgggaactacacgtagtcgccagagcgctgccatccaacgtgagatggccaaaaccaagccgcccagggactcaaagccgaggatttcttcccgagcgggaagataagccgcgcccgaacccaagtcgggcagctaaaccgcgacgtaaagcagtacggaaaagataaaaagcgtctcatagatcaatgcatgacacctttacgtcgagttaccggacaactttacgttagaggactctaattggctcaggtacgacaattctatttggccctgacatgcaaaaagcgcataatgtatattatgttaaattattatgacgcataacaaaaatatcagtttcgcgtaggccaatcgctagtcgcgacggactgctcgtgtcctcttgtgctagctatagatggctgtttcgagctttttgatcttggcaagatatcgtcgaaggcgaccggctcttcatcgaacatcatgggcgccatctccctgtaatccattcgcaggtctttgacccgtgcttcgttcggcatcagacgcagcgtccccggccgcgcggtaccgtaactggaccaggccgatcggaagaagatggccgccttgtgcttcgccacttgtgccagaaggccgaagttagtggcggcagcttgcccttcgttggtgccgagaagcatggccaggtcgtagtaatgccgagagaaatactgaggtgttggcgattcggccggacggtgtgcttccgcatgtaaggccgtggccttttcccaaaaggtacgctgcgctgacgggacggtcacggtgcagtcggggtcttcgaagaagtcgggatagtcttcagccgcgtaagggcgaataatcttttgcctcttttgaatttcaagtgggtggtatcgtggcgggtttcaggtaaagagcaacaagagcgatgcatagcaaactgtttgaagcagcccttggcataagcgatccgtggttcgtccgggaagtcgacttcaacgcgcaaaccaagacgttgacgatccagattgactttgtcgccggcagccgcttttcccacccggaggtcgccggtgggcacccggttcacgacacggtgaccaaacgctatcggcacctgaacttcttcgagcacgactgctatctggaagtccgcacgccacgcgtgaagcttcccgacggccgcgtggtgttggtcgagccggactgggctggcaagctctctggcttcacgttgctgtttgaagccatggtggtggcgcttgcgcagcagatgccgttttctgctgtagccagaacggtgggtgagtcgtggcatcgcgtgtacgctatctgcgagcgctatgtcgacctcgcggtggccgaactcgatctggccggcgtgaccgctgccgccgttgacgaaacgtcctacaggcgcggtcacaactacctgacgcttgtcgctgatgccgacgcgcgtaaggtcgtgtttgtgaccgaaggcaaggatgctgccacggttggcaagttcgctgcacatctgcgcgagaacaacgctgcgcctgagcagatcggggtggtcagtatcgacatgtcgccggcgttcatcaagggcgtcagcgagcatttgcccaacgcgcgcatcaccttcgacaagttccatgtcgtggctcacgcttctgcagccgtggacaagacccggcgtatcgaacagaagaccgatccaagcctcaaaggcctgcgctggacgctgctcaaggatcgcgacgggttgccagccgcgcagcgtgccgatctcgacgcgttgatcgccaacgtcacgaccaaacgcactgcccgtgcctggctgtatcgcgagcagttgcgcgaaatccttgagcgcaagcagatcaacgttgtttccgcaatgctcgagcagtggtgcacgaacgtcatgcgatccaaggtcgagccaatgaaggaggtcgcgcgcatgatccgcaagcatttcgacggtatcgttgcatggacccagacgcgccagaccaatggcttcctggaggcgctcaacggcctgttccaagccgccaagcgcaaggcccgcggttatgtgagcttcaaaaccatgcgcaccgtgatcttcctgatcgccggaaagctcgacttctccgcgatcaacccgcatgccgcataacccactcatttttcaaaagagccaatcttttcctctgtaggccagggatcgccgcgcgctcccaactcgagcttcacccgcggagtgatgtacgtcatgcccatatattcggtttcgggcaatgccgtcggatagtggaagttcaccgtctgggcatcgttggagtcgatctcaagcgaccactcgtggcggcctccccttcccttaggccaaagaggcgcttcaaggtccagcagacccaaaagtctttttcgatgatcgtattcgcgatccctcggttggcgccgctctcaccaaatagggccgcccgatcttctgcgggaagtcgggcaaccttatccatcgatttcaaccgacgccgtgttggcgatcgaggtcagcgtcgggcgcatcctggccggcgcttggtacgctgtggatgcgagagtcttcttgtcgctggccgacaggcgatgggccgcaatctgtgcaacgtcggcggcacgcacaggtccgacatggcgtaatgcctgaaagacgatccccaccgcactccccggagcgatcagatacaacaaggccgtgatctacggcctgttgttcgatgtcgccgccggcaccctacggaccatcgccgccgacccgaggcacctcggcgcgcagattggccgagcggctgcgccagctcgcgcgcagcctggagatggccgaggcgttcgatcgcgattggtccttgcctcgcggagccgcccacgcccagcgtaggcccgaggctggtcggggccgtcgccctatgagcgggcgctagtgcgcttcggctcggatcgctggattttgggattccctcaccatagagtgatctcggcatgatagcgattcggcgcattcggccgcgaacggttgcgagagcagctggtcgcccgaggaatctcctgggaggaggcggcagaaatcttggcgcagcgccggggcaggccgacccggaagcgccaccgacgcccctggccgcccaggtggcgctaagccccggcgctccgcgcggcggctacgagcaaacgctggcgttcagcgtccggttcgacaccttggcggccggccttgttggggccagaaagcgcaacagcctggccgccgcacgtgaggccgtgggggcggctggcttcgccgcgcccgagtggtttcgtgacatcaacgagacgccggacgccggcgaagctgcctcgcaatggcgcccgtggctgcaagccggtagctgggcggcgctgcagcagccccacaatgtgcttgcggcgcgcgccctattccagtggctagcgacttgggatgtcgacttctgtctcgaatactttcagctgctcgaacccaagccgctgctgccccgggtggcgccgatgttcgatccgcgcgtgttcgagcccctgcccgaggcaggtgtcacgatcagctatgagatccaacgtgattcttcagatatctcgctatctgcttgagtgggcgggtaccatattgccgcacacggatgccatgatctaggaaacgcggatatgagagtcaagattgccgggccggtgacgcctgagcggctggtcgaggcgctatagcgagtcgccctcaccttcgaaggggtctacggtgacgagttcgttgggttttacggcgcgaacctttatgtgcaggcacgaaggacggccggcaggtattcatgccgcgaccaacaagagcgagcagttcaatgacttcgcgcagtggctgatggcctccctgctctcgggcaaacgatgcgccatggcggtgacgctgtcggacaggcgcttgcctgggggttttgtcgcgacgtaggcagtccaaatcccccagctggtatcccgacggagtaggaagggtcggtatggccccctctccttctcttgtctcggatgaccgcctttcggtgaaccagccactcggctcgaagcgctcggacgtctcagaagggtcgctaagaggcagatctgcgagctgctgttcgcccgttcgtcggcttggtagacttcgctgttctattcgcactctcaacgctcgcaatgcatatcctgatcacgggcgcagcaggctccagtacgtcaacgctagcgcactcagtcggcttcgcaacccatgcgcgcggtctggaatcggacgatttcttttggcgtccgaccgatcctctctttcaagagaaatttggcgccgaggagcgaacggttgttctgttgaccgcatgccacaggttcttctggcacacggtgccatcattcacgccgagcacttcttgaggactaacaatgatcacaggacacgtcttcattgccaccagcctcgacggctttatcgcccggcccgatggcgacatcggctggcttctggagcgggatgacccggccgaagaccatggctatccggccttcatcgccgacaaggacgcgatcgtcatgggccggggctgctatgaaaaggtcctcacgatgggcgaatgggcttacgacaggccagtgctggtgctgtcccgaaagctggccggcacgccagtgccagaggggctacagggaaaggtgcgtttctcggattgcacgcccacggagacgatgtcgcaactggaggccgcaggcatgcgcagggtatacgtcgatggcggccagttggtccagtcattcctgcgcgagggattgatcgccgacctggtcgtcactactgtgccggtgttgatcggggcaggaagatcattgttcggagccctgccgcgggacgtgagtctggcgctcgagtcgagccggctgtttccgtccggcttggtgcagtcgacctatcgcgtgctgcgctgatttgagcgtcaggtgcgaatcaagacctgaactacgaaggcgacgggtcgctcctgggaatccttttccgggaactcgacaatgacgagccgatgcggctgctagtcgccttcgagaaccttggttcgaccaccgcggcctaaatatcttccaccgtagcgcgcctcagtagccgggacttctcgtttgaactcttcaaaaagggccgggtctctgatatcgacatcggcaatcaggtatgcagacatggtgcgctcctttccgcggtagtccaacggcccattgtcattgcatgattgcaggcggcgctgccttgaagtcgagggatggccatgccactgggcataaccgcccagcggccttccgacctccgcacgcccaatgtcctgcgtgtcaaggctcatttcctgacgacgatatccgccttcgtcttgccgacaatatcaaacaattccttttgctcagcagccggaaccttgaacttgttcagggacttcttgaactcctcggccatcacgtcccactctcgctcgctgatgttcagatgagcatgcgactccttcatcggctttccggtgtacttgcatggtcccccgcttgcctcacagaccaattgtgcaacctggaacttaagatagggtggcggagaactctttcggccggcgttgatggcaggattcctgtttagtgtcttattcgtgacgagcctgtcgataaagtcgtcgaccacgatcgtgatccccttcagcccccctaatcgatcataaagtgatgcctgtgcgccgacctgttgcgccaatactgccgggccaaagcaagcgcaaagtgcgaacgagataacgagtaatgctctcgagaagagtctcatttcctcctccagtagttccgggccaacaagccctttgaagggaaatctagtgcaaacgagctggtcggtctgtgcgggatcgcacgccgtgcggtacacccaactcctcacgcgacgatcagcggcattgcggccgacgtgatcgtgcggcattttttcgttgaatctcggagaggacaatttggatcccgtcgcgcacaatcaggccctcctgttccatctgtgccagcgcgcgatacaaggtttcatgcgcgatcccaagcgtgcccgcccattgcatgagcgttccgggcggtgtgaaccgtccgtaagcatcgtgctcgagctgcagacaatgcaggatgcggtcgcgcggcgagcgtagcgtcaggcgttcctcgcgtgcacggctgcgcatgagttgccgcgacaggagccgtacccattccaccgcgaacgatggatcgccctgcagacacgcgagcaacgtcctcgcaggaaaggcaaacaattcgctcgctctcccgcaaaatgcgtcgcagtggtagtgggagctgaagaggcttgcttcggccacgaaatcgccggggcctgcagtctgcagcgtgaggggttcgccgtccgctccgtcacgtcgcaatagcacctgccctgtctgcacctggtagatcgactcgacccgctgtccgcgattgaatacgtacgtgtcaggatcgtaccggcgcaagcgagccgattcgcgcagcgcggcaggccacgccggcagggccgccaccgccggagcgggggacgaatctggcaaatcgtcgactggcatcctggtcgtatgcgcggcttattccgctgtcgaggcgttcgccggacgatgatgcatcatgccaggggcgtgccctgccatcgcgtcgtggccatgatcggacaattgggcatcgaaccagacgtgcagcgcggcgacgaggcgaggctcgtccgtgtgaaattcgatttcgcctccatcgggcaagtcgcgatagtggatcttcagttctcccggctgtgctgcacgcagcgcggctaggcccggcatactgttgccgtggatctgctccggcgcctcgaagtcacccgccgagaactgccgagcgatcgcggtcagatgcccgcggatcagcgtaacctgcttcgggtcgtgatgctttgtgacgacctgttggttcccaccgtccgccgtcttcgtaaagatgtgggtcgtagccgcaagggtgaacggcatcacctccgcgccgtgttgcccaacgtccttctggcgcgccgtgacttcggcgatggcggacgacgacagcgcagcggcaccaagcaggatggcggtcgatgccgcgattacagtggctgaatggcgtttcatggatcacttcaatcgaaagtatgctcacagtctagtgccggtatccggctcgctctatgactgaaatcatacgcggtgacacgccgtttgaccgagcggtggtcgcgcgaagtcaaaaaaacggatacccacccgtcggcttcgctcaatctaccggacattcgacattctccaaccccaacggaattggcgaccttcaagcggctcgcttccacgccagtacacgaattgcgtggaagaaaggccagaatatgcctcctcgcgaaagcggttgacggcctcccgctgctggagatattcggcggccttcgcgggcaatggcgggccatgcgtcaaggcggtataagacatcactcaaatcgcgaccgctcacaacactgtccttgctgcacctgcggacatcggaccgagccaaatgagcagaacacgcagcagtctcccgacttgggtttcagcagcactctgcaatgccgacactcatagaagaacacgcacgcatccataggcatggtctcccgctgcgcccacccgcaatgtggacaggtcacgactgattcgaggatgacgtcgtgcatcgcgctatcgtcgttgaagatcagacagatcgcccgcgcttcccgtccacatggctcagtgctccgaagcgtccatgagacgccggtgaatcagccagtcaaccgagagcgccccgcccccccgtgccagcagtaccagcagcatcgccgcccactggatatgcgtgggccatgccagcggatagacgaacagctggatcaccgtgatcatgccaagcagtatcagcgccacggggcgggctgccaggccgagcaccagcagtactggcgttgtcagctcaacggataccgccaggtagcggccagttcgggcggcagtagcggcagccggtattccccccggaacagttccaccgccgttgcccagttcgccagcttggccatggctgaattccagaagacggtggcaaccgcgagccgcaacggaatggccaggattgtgtatggcatgcgatcgagccaatccaccacgcgttgcgcgtgcgcgactatcgtgaggggggtgtggggagggggcgtggcgtgtgtcatggcgagagatccagaatgggtaagtcagagatctgggtccggctagctgtcaccagcatggcggtcacgtcatccagcatcgctcccagcatgccgcgctggacctggcctgccgggttcaggaaggccggcgtggcgtggtaggcggattccagcgttcccgctttcaggtcgaccgcaccgattcttccaccaagcaacgagcagatgggggggggcggcacctgtccgcgctgcatcctggcgaagtagttgtccaagttcatatccaatgatgtcattcccagtcctcccccatcagcagttcaggtgcttcttcatcccgagcagggccagcggcgttatgccggccagctttcgctcaactcagcggcctgcgtctgcagcgcatccgggtcgccggccacgcggtcaaggaagccgcatgccagcatctgcgcggcatcgagcttatcgacggccagcagtacgcgtttggcggtggccaggccgagccgagacacgtagcgctccagcccgccgcggtagaacagcagccccagccgcgccgccggcatgaacatgtcgacgccatgcgcgccaagccggaaatcgcaggctagcgcgagatcggtagcgccgccgtacaggccgccctggatcaaagcgatggtgacgggccgcgccgcttccagcgcgttggccagcgcttcgaagcgctcgccggcgtcgctactgccgacctttccgatattgaagccgctgcagaatgcaggccccgagtctcgatgcgcagcaccagcacgtcgggacgggcattgacggcggcgatctgctcgcgcatcaggtcgaggtcttccggcttcgcattcgctttgagcgtagggccgacattcacgaagcattcctcaaactcggttggtcccttgtctgctggaacatcttcaggcgtacggagcagtcattttgaaacggtctcttatcaatttccgcgcgtgatcccacgtcctgatgtgaaaccactctgtaccacccgatcctggcaacggttttagcgatgtttatatagcagttcgtgcaggacccttttctgctgcgcgacaggagcgcgaagtccccctgtaaataatggatgactcgtgatctataggctgccgacacgcaaagagcgatgccaaacatctcttgctattccgatcttaaattcttttagattggaatgacgcagcatatataaaaatctgaactcgtccatcgttgattcactttacgttgggcttgcatgtaatcctcaagcgcaaagttttctgcaaaaattatgaagaagatcgatgcgtagcaatcctcgacaacgagggctcctttcagtggcttcggttggggatgggtgtccggtatctaaaaatccgccacatccctcggcaagcctccgatttggctgaaattttcagcaccggtacccaaggtcagcccgtagtcggccatctccgcctggatccagcggatcgccgccgcccgctcagtttttgctgtcatcgctgtcgtcactgctgtccgctgccgtcatccggcttggaggcggccgctggcgcgccctgcttgtcgtcttgctgttcgtcccgtgtttcgcttggcaccgcctcgtcgttcggcgccgggccgccggccttgcgccgccgtccgccaccaccctcgccccgccccagatgcgccccccgcaattttgccagcagctgccgcgccagcgccgcttcggcctcagcgcgctccgcgcggcgctgcgccgcgcccagctccgcctgcaccgcgtccaggtcgttcgccgctttgcgctgcgactgctcggcggccgcgagccgatcggcgagcgccgcggcctgggcctcgagccgggcccggacttcggcctgtgccaccgccgcgtcgcgcgcctcgctgcgcgccgccaccagctcgccgcgcagtgcttcggccgtgcgctcgctctgctggcgcgcggtacgctccgcgtccagttcgcgcaaggcccgtcgctcgctggcttcggacccgctcctgggcaagggtcaccgcctcgcgggcacgctccagctcggtcgagaattgggtacgcagttccgccagttgccgcccccggcctccagttccgcccgccccgcttccagccgagcttgggtcgccgcgtgcgcctgccgctccgcggccagcgtcccctgaccctcctcgatgggttggcgctcggcttcagcagcgctggcggcggcgcgcgcctctgcgcgcagcgtggccagctcgccggtggcggcctcgttggccgcctgccagatggtctggaccgccccggccgcgatgtccttcaacgcctccggcaagtcgggatggtcgatggtgacgcgcgtgcggccgcgcagctcctgccagaacgcctgcagcacctcggccggcgtgcccatgctgcccttgcgcaccaggctgtagagcttgttggcggtgggcgtgacgccgtagcggaagaacagcaggccgcagacctcgcggtagagcgcgcgggtctcgggaaagcggctgcgcagctcagccaggtcggtttgcagcgcggcgtcggtcggagaccgcgccaaagcggtctcctttttgtgcggtgcacctgcgtgccactgccttgtctcgctatcggcaagttgaaagcgccccccgtagtggcctgtagtggccggaggtgtgatcaggcttttggtttggctgctgcggcggtaggcgttctcgccttaatacaagaccgacggcaggaacgaaccttccggctgctggtatagcccgatgctcatcaaggtcatcggctgcacaatgcgcagcccgcgttccaggcaccagcgcagcaactccccattgcgcgtgggcagaaggaatccggggccggcaaaggcgggggcggcgccgatcagcgctttcatgcccgtgttgttttcagcgacggcgtgcccgaagaatccgatggcggtcgcataggccacaatgcgtccgtcgtgtgcagccacactcgccgttccctggtcgattgcatcgcgcagttcgcctgcgcgctcatgtccgtgaacctgcaggcagaggcggttgcaggcgtcgaggtctgatggtacagccgcccgcactgggtagccagggacttttgcattcactgcgctgccctgcagtactgaaagcggttcccgcgcttcgaagccaagacgggcgtaaagcgacaacgagcgattgtgatatgccgcctggacgagtcgaatgccggcggcattcctgctgcggccgcgctgcagtacgtgctccatcagggcgtgtccaactttcctgtcttgaaccgaggggtcgatggtgatggggccaatgccgacgattggcccaccttcccacagaaaattgctgccgatgacgtcgccgtcgatttcggctacgaccgagaagacatcctcgcgcgagaacaagtcggccatcaggccaaccgctacatcgggcgagggaaaatccggcgggaaggcatgtgcctgggcaatcgccgcgaaggcgctgaaacagatggcgccgcatcgcgcggcgtcttccggctttcctgatctgagttgcagcgtcatcaaggttctctttttttcaagggcccaggcaaccgaaaaccatattccacaaaatcaatgcgttacgcatggacttcacagcttagaaaccgaactggcaatttcaattcgccataaggcgaattgacaaaccggggtgtcttcgctgtaaacctccgatagcatggcccggtgtcgaacttagcacgtgtggatagcggtcatgaactcggaaattgcgaaagtgtcgccagtcgccgggcgaccacgaggttgtggcgccgttcgcgcagagtggcgatcacgtccgccggcaagtgcgactcgacgttgaccatcggcccatgcgcgatccgcaagcgcggggcatcgctcatggcctgcgggaatcgctgatcaatagccgctgagcggagcgtcagcgcttgtttgacatccgactttcacaattcgggagagtgggagtggtttgaacccgatttggggccgaatggcacccattactctcccttcttcagccaccagatcggcagctcgccgacgccttcggcggcgggctggtatatgatatgacgcgctcggcttctatatggtggcctggcaggccggcgtcgggctggacgtggccgccgggctggcacaaatcgcattcgccgcggcctcgcgccggcggccgccggcgctggcggcgacctagattcctgagatgcggggtggtgccatgccttggcacgtcggcttcggctcgctaggcttttaagggtgacctttcagcggcggcgcaccggtgcgcacggcgctagtccccgaggccaatctgcgagactggatcgatgatacacgcgcgaaacgtcatccgcagcatcatcctgctcctggctggattcatcctggcagcctgtggcggcagcgtggacgttgtcatcactagcggcgggtcgtcacgcggcgcgctctcggtggtgatcttgggattgcccgccggcacgagcggcgatgtgaccgtgaccggcgctggcggcttccgccagcgcctgggcgcatccgccacgctgaccaatctggcaagcggggcttacacggtgaaggctgcagcagtgctgaccggcagcacgacgctgactccgcagcccagcacccagcaggtggccgtaggcagcacaaccgcgacagccacggtgacctatacggccgcccagtccttcagcctcgcgctgcgggaggtggcttccgggctggctgggccagtcttcctgaccgcgccggccaatgacacgcggctgttcgtggccgagcgcgccgggcgcatacgcatcgtgcagaacggtgtgctgctggcgacgccgttcctggatatctcgaacctgaccacgacggacggcgagcgcggcttgctctcgctggcgttcgatccggcatatgccgccaacggtcgcttctacgtctattacaccgacaccgcaggcgatatcacgatcgcccgctaccaggtgtccgcggcaaatcccaacgtggcggacacggctgggaccatcgtgctgagcatcgcgcatccgaacttcaacaaccacaacggcgggctgctggccttcggccccgacgggatgctctaccttggcatcggggacggcggcggcgcaggcgatccgtccggacacgcgcaggacaccggctccctgctgggcaagctgctgcggatcgatgtcagccgcgccggcagccagccgtatgccatcccgcccgacaatcccttcgccgcccaggccggcctgcgcggcgagatctgggccatgggcctgcgcaatccctggcgctttgccttcgatcccgccgaagccagtctctatattgccgatgtgggacagaaccagcgcgaggaaatcgatgtggcgccattggccagcgccggcctgaactacggctggaacctgaccgaaggctcgttgtgcttggcgtccgtgccatgcagcccacagggctttgtcctgcccctgctggaatacggccacgacgccgctggcggatgcgcggtggtgggcggctacgtctaccgcggcagcgccatgccggcactgcgcggacgctacctctattcggacctgtgcagcggctggctgcgcagctttgcctaccgggacgcggcggccgagcaactggactggggcgttgccatcccgggcagcgtgttctcgttcggcgcagatgcgcagggcgaactctacgtgctggccgatacccttgcgtccggcacgagcggcagggtatatcgcatcgtcgagcgcggcgcgccctagggcctgacgcactggactaatgtcaggcgcagccaacctggatgtagaaggctatttttgcccgttccccgaaaactggaaatctcccgccagcccttaacaggcaaggctttgcggggtgcgattgatcttgaaagtgggccgaacgagcccttcccggccatcgagcctgtattgttcgggggaactcagtcggaggacgcagccggcgacagtgagaagctcagaagttgtaaccttggtcgcaccggtagtgccagtctgagacagcaagtcgcgtactctggccggcgcgaaccgggacgagttgggcaagggacacgacgatctcgcgctggttgtgctgcatttgaacaaagatggagacgcggcacagctggtcatgagcgagcccagtgacggagactcgttcgccggagcgaagcgggctgggcgatctcgtgcacgagctgtttgcgcgtgcgcgtgaggtcgcgcaattcctgtgtcgctgcgggcggcacgaagctggcgcggatcaggccatgcgccagcaggtcggcgatccacatcgcgtcggaattccaccacgggtaatggcacgcagcagccagcggatattgaatcccaccgcacagagcactgggcgcagcgcgtcgccgatttgcccttcagccagcacctgcgcatgccgtggttgtatggccgatgaggctcaacagtctggcgacgtttgagccaacggcgttgttctgcatagagcgatgaccgccatacgggttgccggggaagctgcgcgcgccccacgatccatccctgcctggcggtgatcgtcaggcagacttgccgatgcattcaacctccggcgcatgcagcgcgtacagcttgttcttgtctttgggcggcaggcggtcgaggcgccaggcgcgctcgatccaaacctgcgatccctgtcggcatagtgaccctcgcgcgccgtttggcgatcgccctgtggcgctatctgaaagatggagagagagggcttgagtgttgccccgagtggaatctctcccgggccattctaccgaaggcttactgcaacacagccacgcaaggggcaaggccacctctcgcgaggaaactgctcgtcggcagcggaacggttcacgctcgccgcctgatccccgcgcattggctggatggaaagcgtttcccttgccgcccgcaagtaccgctgcgccgaaaccgctagagtcgcccacgccgcggttgccgccgtccgtgggcatcgtgaagaaaatttgaggtttgtgcgacgcaagcgtgagccctgtttctcatactgcagcacagagacagctacccctactgtccatccaaatctgatgtcggggtatgaatcatgaagagagaacagatcagccgcggtgccaatgcaaccatgctcgcgcagtgcatcgccgacgctgccacgcaggtacttgccgcgcgaggcgacggcgagcaagctatgaagggtagcgaggcaggctggcaggcgccggtcgcgcagtgcgaagcggcaggcgagccgccgcttggcgcacacttggtcacgcagcgtcgcggctacagccaccacggcatatatgtgggcaacggccgcgtgctgcactatgcgggcctttgccgtgggctgcacaccgggccggtggaagagctgagcctggaacacttcggcgccggccatggcatcgaggtaagaaccgagtcgctgccgcgttttaccagcgaccaagtggtcaggcgggcacgctcgcgcttgggcgagaaccgctatcgcctgctgagcaacaactgcgaacacttctgtacctggtgcctgtatggcgaagcccgcagcgagcaggtccgccaatgcgccatccaccccatgcgcatactccgcgtgctgagctccctgctgtcagtttggtggaacagccggccagcccatgcgctgcttgcagccggcttcaatgatcgctctccctagagcatgacctttccggtggcctattcgactaagccgttgattcataaaaatgtaggaccgttgcgatacgctgccccaatgtcgccgacccgccggtcgttcatggcgtcgtcgcgactgacgccccgggcccattcaggccttgttgccgaggctaagatcggcgtccaagtcacaggcggttcggcgctgcgcctgctcggcgaccacgagccgatcggcgagcgccgccgcctcggcttgagaccgcgccaaaccggggctgattaagcggcaaagcggtggtcgttttcatcggcgatggagggataccatcgttcagaatgcggggctggtcattgagcacggccgtccggatctgtagcagtgcgtgcgcgtgctgcagtcgccaggccatctgttgccgtttgacgaatcgcttgctgatcacctggttgacggccgattcgacgaaacccgatgcaacgtgctccccgtggcggaagcggtcaccgcagttcacgatgaagtgccggctgttatccagatagacgatgaactcctcgagcttgccgaggagcttggcctcctcgggaatggcctcagcgtcgagatcccagtagcatcgatctggtgtcgtctgcgcgcagcctcaacaggcatcagtagcagctacactggccatgtgcgcgacggcgtcgtcaagcgcgccttactgtacccgatgcactgtggccttcaaaaaagaaacacccccgcaagggtatcctccgggggcgggcgactcgcaaatggacgcatagagggcgcgcccatcacttggggtacttcttcaagcccttacttttgtgagccctcttcgacgtacccatcgcggttggtgattctcgcgccatccgtaaacacatcccgtctatcggtggttgctctgccaccattggtataggggtctcgcggccccatcacagcgccatcggtatagacatcgcgcatcccgatgccggcatcagcaaccccgacaccgagcgcggcactcgccgcaacgagcaataagactttctttagcattttccacctccttttcaggcggttacatggttccattcaatatgatttgcgcactgtagcttaagcagttgagtagacgattcgggatgacattcccgcgcaggcgggaatccagcgtctttttaaagtcactgggttcctgccttcgcgggaacgacagtggttatctgaacggcatcgccccgggtggcgcagttgctgtgggcactcgtcattcttgccggatcagcgtgcggcggcctctctctgggccgcccgcaggctttcatagacggcaaatcgccgttgatattccgcgctgttgacatcggggccgctatcgccgtgccagtactcggccaggcctgcgcgtgtccaggcttcaaggtcggcacgcacttcggcgcgcgtcaggggaagggccgcaccgctggcgttggcggcatgtgccgcgacagcgagcgtcgagaagagcagggcagcggcgagggaagagatcgtgatgggtttcatgttggtccaggtcctgtttcctaggcattaagaggggttgagccgggccggcgcaagcgcacttcgacattttcatgacggtccgcgacgggtttaaactcggacagactgattgtctgtccttggtatgtagtgtgcgcaacggaactcacgcctttatccgttaaagatcaaatttccgtcacggcgcaccattgagcgcctatttgtcccctctatcggctatccatgcagaagcgatgaagctagccgcgtcacgctctgatggttaaagccaccccatcgagcaactggtcaagcagcaaaccggttacgctgtcatgcgacgtaagagcgggacggtggcaaggacggattcgagattccttatgtgggcattgccatgctcgatcgcgtgcgtggaaacgctacatcgggggggtgtctgatctgctggcgccgcgcatcggaccatgacgcgtcaggcggcgacacatggcgtggccgacaagcggcgttcccgcgccgcccgtcgctgcgttatccggcaccgggcgctgcctgtgcccgggtcaggtgttcaaggacggctttgcgctctatctcggcggcggcacgcgcggtaaagatgcggtacacgtagtccatcaggacttcttcctccttcatctttcgaatgttgaggaaggccatgtgcccgatcaccttgccctgactgtcctggatgggcaagccgtaataggattcgaagccctgctctcgcggaaacaacttgccaatcccctccgggtagaacaccggcaagccatggtcgaaaaccgcctcgcaaggcgtgccggccaggtcgtactcgacgttgtcgcgaaagtcatccttgaaccagaaggccagcgtgtggacacgccgtggcggccacctggtacattccgtaacgaaggcgcaggggacgtccagtgcgccagcgaagtggcggaccagtgcgcggaaaaattcgtcgccacaggtgccggaggtgccctcgacgatgtgcttgagaatctcttcgacgcgcctgatacgggtcacatcggtatccaggccgaccagccgcaatgccttgccgttggcatggcgaatggcgctgcccagcgaattgacccaccggtagtacccgtccttgtgcagcaagcggcactgctgctgatagcgcgggctggcaccctcgaggtggcgtgccatcgcctgctcgaccgcgagcaggtcggcgggatgtacccgttctttccaggcctgcaggctatccggcagttcgtcttcttcaaagccgagcatggccttccagcgttgcgacaggtggaattcgttggtctggaaattccattcccactggccgtcatcggcgctgcgcatggccagggtatagcgttcttcgctggaacgcagcgcgatttcctgctgtcggcgctgttccatcgacaacgccaatgtgctttgcgacgactcgacgcacgcgcgcaagtccgtgacgacctggcgaatctgctcgaattcatcagggggcttgccgcggccggcgccatcgttgcgtgatacctgggatgcggcgcaactgcgcagcagcgcgctaagcggacgtccccagaaggcgtgaatagcaagggcgagcacgccaagcagcaacgccagcccggccgccgccaccagtgcgatgcccgtgcgcgtgccgggcgggcccgcgccgggcacccagccgagcaggaggtaggcaatcagcagcaggctgatcaatgccggcggcagcagcagctttgctctcaggcccatcatgattctctttctgttccgcccccgtcgctacagacgcgcatcacaacaggtgccttttgctttacagcttgcgcggttctgtggaggcatgccacgtccgcaccaccctcgcgtgacacgccggcgcgagcccttcctaacatagcccacgatcccgtcaccaaccagtaccgcggaatcacgcccgcaccctgcccatagcgctgatcggaggacttaattgaaggccgcgtgagagtttcgtgatctttgtcggccagagtggggctgaaggaaaccgccaccgacaggacttccgatgctatccaccagcctccaccccaatatgggagccgccatcccgccccgggccgggatcggcttgcgcgccccacactatcgccaggtcctggcggaaacgcccgcgacagggtggttcgaagtccatagtgaaaactacttcggtgatggaggtcagcccctgcactaccttgcacaggtgcgggccgcccacccgctgagcctgcacggcgtcggcctgtgcctgggcgctacggaccggccggatcgcgcgcacctgcagcggctggctgccctgctccggcgcttccagccagggctggtatccgaacatctgagctggggccgcattggagaccgctacctcaacgacctgctgccgctgccctacacggaggaatcgctcgccgtcgtgtgcgaacacgtgcaggaagtacaggactacctgcaacagcagttgttggtggagaacatcaccagctatctccggttcagccactcgacgattgccgagcccgagttcatcgccgcgctggtggcgcgaaccggttgcggcatcctccttgacgtcaataacatctacgtcaacgcggtcaaccacgacaccgatgcatcgggctatatcgatgcgatccccgtgggcgcggtgaaggagatccacctggctggctttgaccacagcggcggcatgctgatcgacacccacggccagcgcgtggcagagccggtatggagactctatcggcatgcgctcgcccgctttggcccggttccgaccctgatcgagtgggataccgacattcccccgctcgaggtactgctcgacgaagcccgcagggcagaccagatgctggagaccgacgatgccttcattgcatgagatccagtgtcgttttgcccgggcggtgctcgagcaggacccggctgcactgttcgaccacatcgtcggcggcgccatggacgcgcagcggagcctcggcatttacgccggcaacgtgcgccacaacttgtgcgaggcgctgcgcgccgtattccccgtgatcgagcgcctggtgggcgagccgttcttcgatgccacggcgggccggtatatccgggcctgcccatccaccagcggcgacatccagcgcttcggcaagagctttccggacttcctcgcgcaattcggaccggctgcgggcgtgcgctacctgcccgatgtggcaaggctcgaatggctgacgcatgaggttttccatgcggcagacgccgagccgctcgcgctgaagcgcctgggcgcgctcgccgaggctgatgccgcatgcctgcgcctgaagctgaacccggcctgccgcttactcgcgtccccatttccggtgctgcatatctggcaggcgaaccagccagatcatgcggacgctatcgagatcgacgccgacagcggcggcgactggctgctggtcaggcgcagcggctttgtggtcgaagtgcagtccctgaatgtcggcgaatacgccatgctcgacgcactggatggcggtgccgcgctcgagccggcgtatcagcgggcgctgcaggctgcgcccggcttcgcactggccgactttatccagcgacgcatcctagacgcgacgatcattgatttcgacgcctgcgctgctggccttatccccgcgccaggtcgatcgtaaaggcagtgcccttgccgagcgcgctgcgcacacggatctcgccgccgtgcaactgcacgatgcgccggctgatggccagcccgagaccgacgttgctgccattgtcagactccgtacgctccactcggtagtaacggtcgaacacaccctgcacctggctcgtgtctatgccctggccggtatcgcgcacggtcagttcgacgcgctccccggcggcctggacgtcgacgctgatttctccgccggcaggcgtatagcgcatggcgttctcgatcaggttctccagcacccgctcgatcatgccgatatcggcgctcaccggcggacaaccgggacctgacgtcgccagcagggccagcccgcgcttgtttgccgccagggcgaacttctggaccacgtcctgcgccagttccgacaacgggaagctctccagccgcggctggacctcccgcgcttcgagcttggtcaggtcaaacaggtcctgcaccagcttgccgagccgttcgcaatgcctggtcgccacctgcaggtagcgattgcggtcctcgggcgtcatctcttcggctttcagcagcagcatttccaggtaaccctgcatcgatgcgagcggcgtacgcaggtcgtgggagacattggcaagcagctcgcgccgttgctggtccacctgtgacagctgggcgagctgcgtgacaatccgctcggacatctcctcgaacgccgtgctgagcttctggatctcgtcgtccgcacggccgtctcgcgccagtcgcaccggcgtggaaaaaccgccagcccggaatgcctcgatggcctccgacagcacgcgcagccgtaccgtcaacagccgaaacacgatcagcgccgccaccaggctgaaggccaccgtaccgataatgaggtcggtcgccagttcgatcaggcgctgcgtctcgatcatcttctgggaggccaggatcatcagcgcgccgatggtaatgaacaccgccatcagcaccaccgccagcctgccgtaaagggtgcggatcatggaatcccctttcccttcccctattgcgccctattacgtattgcagaacttgtagcccacgccccagacggtctggatgtactccggctcgttggggtcgagttcgatcttggcgcgcagccggttgatatgcgaacttaccgtgtgctcgtagccactgtggctatagccccagacctggtccagcaactgggcgcggctgaagacgcgccccggattgctggcaaagtagagcagcagctggaattccttggcggtgaggcagatcggcgtgccgcgcacgctcacttcacgcttgtcgatatcgatgtgcagggccttgacctgcaccgtcctgggaccatcggatggcgggttggccagggtgtcgaccagccggaagatcgccttgacccgcgcggtcagctcaaggacgctgaacggcttggtcaggtagtcgtcggcgcccatctccagtcccagcacccggtccagttcagtcgagcgcgccgtgagcatgaggatgggggtatagcgcggttccgcgcgcaggcgccgacagatttccagcccgtcggcgcccggcagcatcaggtccaggatgaccaggtcatagggacgactcagcgcctcttccagtcccgccctgccgtggttgatcaccttcacgtcgcaagacagcccgctcacctgcagccgtaccagttcggcgatatctgcgtcgtcctcgatcaccagaacctggcgcgacatggctttacctcatcttgaaacctgcgggataccggcatgaccttccttgccgcctggattgcggcgtgggagccactgaaccattctagaacgcatttcaaggatggaaagccctccgccggcgtggccaagattggggcccgccagcacccaggcgccgtgaagaaaatttgaaaattgagcgaaacaagcgtgagttcggctttccatactgcagtccagagacagggatttctcctgtcctgaacccaagcaaatacggagtgcgcatcatgaacagtgatcaaattatccgcggcgcgattgcaggcatgctggcgcttggcattgccggcgctacctctcaggccatggcagcggcaggcagcaatgaaaaatgcgcgggcattgccaaggccggcaagaacgactgtggcaccagcaagagttcctgtgccgccacggccaaaatggaccgcgacgcggaagcctggatcctggttcccgcgggcacttgcgaaaagatcgccggaggtcggctgcagacgtcccagtttgccaagccaggtggcaagagcggcgaactcagcccggccgccaaggcggcccacccggcctgagcggtcccgagcctgcagcgaaacgccgtgacacgtgccgcgtcacggctgaccggcgtccccaactccctgaccgcttcgcgaggtagcccaaatgaaatgcacgacccccctgtcgtccacgccgctggatgtggccgacgcaaagccttcgcgcctcatcggagccgggcaggcggcgatccgcctgctggaaatgctggctcccgtgctcgatctcggcattcgcgtactgatcggcctggtgttcttccagtccgggctgaccaagctcgccagctggtccaccacgctggcgttgttcgaaagcgagtacgccgtgccgctgctgagcccgaccctggccgcctatcttggtaccgccgcggagctgtgcctgccggtgctgctcgtgctcgggctcggtacgcgggcagccgcgctggccttgttcgtcttcaacatagtcgcggtgatctcgtatccgggattgggcgaggttggcctgaaggaccaccagtactgggggctcctgctgctggtcacgctgctgcacggcccgggccggctgtcgctggaccacctgatcgaccgcttcctgctgcgcggcaagggcagccattagctcgaaagcccaggcggcgtgccagggcgaaaggaaccgtcatgcttgcagagaacaacatcgtcatcatcggtggtggattcgccggcaccacgctggcccaggcgctggagaagctgctgccgacgactcaccggctgatcctcgtcagcgacgaaagctacaccaccttcaacccgatgctggccgaggtggtgggtgcctcggtcttccctgaacacgtgatcgtgccgatccgccagatgctcaggcgcacccagttcatcatgggcaccgtgcaggacgtcaactacgcccagggcaagctgtcctgcacgaccctggcgggcctgcgcgagattcccttcgaccacctggtgtttgccttcggcactcgagcgaatctcgacctggtgccaggcatggccgagcacgccctgcccctgaagcttgtgggtgacgccctgtttatccgcaaccgcgtgttgcgccagctggcccgcatggaactggagtcggacccggtcctgcgccgccggctgggccatttcatcgtggtgggcgggggcttttcgggcgtggaggttgccggggaactcgccgattatctttgcagcatccggcgcttctacccgcgcgtgcagcgcgaagagctggcggtgacgctgctccatgacaccgggcaactgctttccgagttgcccgcctcgcttggcatggccgcggcacgccatatggccgcgcgcggcatccggctcaggctcggtacccgggccctccgcttcgaagccgacacggtggtgctggctgacggcgaaatgatcgaaggtgcaacggtggtctgcaccgtcggcaccaggccgaatccgctggtcgccaccctggagcgcaatctcgcactagccacccggcgcggacgcatcgagaccaacccggatatgtcggtgcgcggcatgcccggactgtgggccatcggcgattgcgcacgggtggccaacgccgccaccgacgaggattcgctgccaaccgcgcagttcgccgtggctcaggcgcgccagcttgcccataacctcgccggccacctggaacagcgtgaaagcaaaccgttttcgtaccagagcaagggcgcgatggccagcatcgggcatatgaagggcgttgcccaggtgtatggcttcagcttctcgggcttgccggcctggctggcctggcgtgcgctgtacctgatgcgcatgccgacgctcgggcgcaagctgcgcctctgggcggaatggacgttgtccatgttcttcccgactgacatcacccacctgcgctttacacgcaccagcgaggcagacgaatcgccacccgatgggctgccaccccaccgcccacaagcgccgggtgcatcggcaacccgcattgcaacgcatgacttttccgggataccgcggacgccctacgccacccccgccgcccccacgctaacaggagatcaacatgcttgaaggaaaatcagccatcgttaccggctccagcagcggtatcgggcttggcattgcgcgcgcctttgccgcccatggcgccgatgtactgctgaacggcttcggcgatgccgagcaaattgaagccacgcgtgcagggctggagggcgagtatggcgtgcgcgtgcgctattcgccggcggatatgagccaaccttgccaggttcgcgaaatggccgaatttgctgcatccgagttcggcaaggttgacgtcatcgtgaataacgcgggcatccagcatgttgccccgaccgaagagatgccggacgacaagtgggacgccatcgttgccatcaacctgtcctcggcgttccacctgatcaaggccgtcctgcccggcatgaaggccaggcgctggggccgcatcatcaatatcgcctccgcccatggcctggtggcttcgccgttcaaggcgccctatgtcgccgccaagcacgggctgatcggcctgtccaaggctgtggcgctggagacggccgagtttggcattaccagcaatacgatctgccccggctatgtcaagacgccgctggtggaacagcagatcgccgaccaggcgcgcgcgcaccggatctcgcccgccgacgtcgtgcgcgatgtcctgctggtgcaccaggcgcgcaaggagttcgtgcggattgacgaacttgctgtcctggccctgttcttggcctcggacaattcagcctcgatgaccgccactgcgctcgcaatggatggtggctggacccagcactgagggcgagccatgtcgaccaatcctggaacgcgagatgccggagaaaccggccaagccgtgaagccgatcacgctggcgctgcaaggcgggggtgcccatggtgcctttgcctggggcgtgctggaccgcctgctcgaagacggccggcttgcaatcgagggcgtcagcgccaccagcgccggcgcgatgaatgccgcggtgctcgcgtacggcctgctccagggcgggccgccacgcgcccgcaccgccctgcacgacttctggcgcgacgttgccaacgccgcgcgcgccagcaacccgttccgcaagctgccatgggagaccttgctgcacaacggctacgggctcgattactcgccgatgtacctgctgacggacatgatgctgcgtgtgctgtcgccctaccagttcaacccgctcaacttcaacccgctgcgcgacgtgctggcccgccatgtcgactttgacgcgcttaaccagcactgcccgatccacctttacctgtgtgcgaccaatgtcgagaccggcaaggtacgcgtgttctcgcgcgacgacatcagcctgaaggctgtgctggcttctgcctgcctgccgttcctgttccaggcggtggaaattggcggcgaacactactgggacggcggctatgtcggcaaccccgccattttcccgttgatctacaactgtggcgcgcgggatgtggtgatcgtccatatcaatcctatcgtgcgcaagggtgtgccgaagaccgccgcggagatcctcaatcgcatcaacgaggtcagcttcaactcctcgttgatccgcgaactgcgcgccatcagcttcgtcaccaggctcatccaggatggcaaggtcaaccgcggggaaatgaaggagatgctgatccactcgatccgctcggaccagaccatgatggcgctcggcgtctccagcaagctcaatgccgactgggacttcctttgctatctgcgcgatcagggccgggacgaggccgggcgctggttgcagcagaactacagcgcaatcggtgaacggtgcagcgtcgacttgcaccaggaatttctttgatccaccacgtagcgccaccgaagcggtcggcgcggattcctcaacccacggagtttaggaccatgactaccaccaagcaagccgtacccgtctggcatcgcgcgatgcgcggcgcgatcgtcaccgtcaccctgtccctcgtctcagtgatggcctacgccggccagtgccccgccgacaagcgcgtcgcggatggccaggggcagcggcctggcgcgacagaacccaagggcgtcaccgatacagtgcgcgcctcgaccgacctttcgaaggagccggcagccgtagcgggacgcctgctgcggctgcgccagctcgacgtgcagcccggtggcatcgtgccatggcacagccacaacaaccgcccggcaatcatctatatcgtctccggcgagatcgtggagtatgcgagcaactgcgcggttccgatcgtacaccgcgccggcgacgtgaccgcggagaggaacgggacttcccactggtggaagaatgaaggcggcagccccgcagtcttgctgtcgtccgatctcttcccggtcgaaatgaagatggacccgcatactatgtgaacagttgcggggacggctacctgcgcatgcccgaggatgatgcgcccatgaaactcatgctgctgagtctgtcctttgcgggcgccctgctttgcgccgccgtgatgggattcgccatccagcgcggcgcaacctgtgcggtcgccgcggtcagcgagatcacgtcatcgcgcagttgctcgcacctccgtgccatggcagaagcgtcgctgtacgtgtgtggcggactgctgatcgcgcagcggttgcatctgcttccggccatgccgtccggctatccggtcgatggcctgaccgtcctgggaggcgccctgctcgggctgggcgccttcatcaatggcgcatgcgtattcggcgccatcgcccggctgggcagcgggcaatgggcgtatgctgccacacccctcggatactacgcaggctgcgtggggctgcttgcgctgtggccgcaagccgagcgcccggcgctctcagccacctcgccggtatggggtgctgcgccgctgctgacagtgcttttccttctgttcgtcggatggcggctgctccgtctgtggcagcgggcgcgacgccatggcgctcctgcacccttggagcaaacgtggcatgcacgcgttgccgcccggatctggtcaccgcaccatgccaccacggtgatcggtgtcaccttcttgctgctcctgttgctggcaggcgcgtggtcatacaccgaggtgctggccgaactggcacgtggcagcgctgccatgctgccggcacgggcattgctgtcgctggggctgctcgctggtgccatcctcggcgggatgagcgctggccgccgcgaaggtcccgcgacttccagtgcgcagtgtctccggtgcttcacaggcggtgccatcatgggctggggcggcatgctgattccgggcggcaacgatggactgctgctggtcggcatgcccctgctgtggccgtatgcatgggtcgcattcggcacgatgtgcgtcaccatcgcgctcgcgcaatggcttcagcgtcggcttggccagaccgctacgactccgggcgccccgcaatcctaggcaagactagcaggaccagtcgtgttgcactgctgacagtctgaaggagtaagcatgagccaccgtatcgggaacgcgctggtgatcgcgaccgcgctcgctgccgtcgggcttgcgatcaagcagaacacgcatctgctggccagttccccggcacactttgccctggaccgtgaacggtgcttcggcgtagccagggcaggcaggaacgactgcggcaccgcgctgcacgcttgcgcgggccgcgcccgccacgacgccgccggcgatgaatggctgatgctgcccgccggcacctgcgcccggatcgcgggtggcagcctcaggtctgccgcaccctgagcggtggctgcgggaccgcgcgatgaaagaggaaggacagacactgacggcaccgcaccggcagaagtcggaacgtattgcggcaagcatggcacggaaaatcgctgcggggctagcagcgaagctcgccgcgttgggccagggcatgcagttgccgccacgagtacggcgggagctggagcgtgaacagtatctgagcgagttgctggtgacctcactgcaactgctggtgctgctcctgttcgcggtcctttatctcggaacgcccccgggcttttcacccgacgcgcccgtacgcgcggtaccgctcggcatctcgctgttcgcggtgctggcgttggtccggctctaccttgccatgacccggcaactggccaactggatggtgggactgagcgtggtggccgaaatggcagtcctgatcttcgtcatctgggcctaccacctgcagtacgagcagccagcccagatgtacctgaaaaccaccgaattcgcctatatcttcggcttaatcgccttgcgtgccctgcgcttcgaaccgctctgggtggcgctgtcgggcctcacagcgaccttgggctggctgctgttgctgcactacgcgctgacacacgcgagcggcaaccctgtcacctgggactatgtcaccgcattgcgctcgacccagatccactacggagcggagttcgacaagctgctttccatcctgatcgtcagcgccacgctggcattggccctggccagggcgcgcggctttgtggtcaaggccgtcaagggccaactggcggtcgcggacctgtcgctattctttgacgattccgtggcccatcgcatcaccgactccgaagcaagcgtcatggtcggccacgccgagctgcgcgaggcgtcggtcgtgttcctcgacatgcgcggcttcactcaggcgtctgccatgctgcagccctccgcactgatccaattactgggcgaataccaaagcctggttgtgccgattgtcaaagcgcatggcggcagcatagacaaattcatgggcgacggcatccttgccagctttggcgccgtcactgccgacgattgccatgcggcaaatgccttgcgtgccatcgatgccatcctggaagcggttgaccaatggcgggttcggcggcagtccagcggtcagcctgcacctgacgttggcgctgggatggcaagcgggccggtgctgttcggcatactcgggcatggcagccgccttgagtacacggtgattggtgacacggtcaatcttgcggccaagcttgagaagcagaacaagatccaggggacgcgaggcctcaccacgcgagccagctatcagcgggctcgcgtgcagggctatcttggcgagaagcacgtccttccccagcagtctgtaggcggcgtaagcggcacgatgcagctggtggccctggcactttcatcggatgcctaattgatttgtagtgtcctgctgtatgtcagcgctggcaactcttgccgcgtggcattcactttcatgaactctcggtgatcccccgttggcagccagtggcgatcaccatttatctcgacaaagggctctgtagctgtaagggagcaaggacgagaagaccccagagggcacaactgacttatgctgccagtgaatagaattgctctgcagcggacggattgcgctcttcgtgggcctgcatctggcccttggcaatcatgtgcatgagctcgataccgcccagcaggatgcgcgcgcagcgaaagtcctttcccagcattgatcgagtcaagcgtttgatggctcgatggtcctgctcgacaatgttattcaggtacttgacctgccggatggtgacgggagtttctcgttcggcgttaacgtcatgcagggccgctaggttagatgcgctgccgtcgatggtcaccgtgtcaggctggccgtgctgcgcgatggctttctcgaaaaaccgccgtgctgcggccttgtcaggctgggcgcgcagcaggaagtcgatggtattgcccccccttgtcgaccgcccggtacagatacttccacttgccgcgtaccaggatataggtttcgtccatgcgccagcttttccccaccgggcgcttggagcggcgaaagattttgtttagcgccggcagcagcatcttcagcgcccagcggtgcacggtcgattggtcaaccgagatgccacgctcggccatcatctcctcgagatgacgcaggctcagcggataggcgacataccagcgcatgcaggtcagcatcacctccagcggatagtgcaggcgcttcaataccttcgcaatctccgcgtttatcatcgctgcccacattgcctgagttcgataccggctcattctatcggaggcatattgcgacaaagcccgtaggactgttcgaagccccgcgccgccgggctctgctcttccttctggcctaggtgccacttgccggtcatgtaggtgtaataaccggcatcgcgcaacagctccgggaacgccaccaagttctggttcaggtagccttcgtagcccggcttgccgcgctgctcgggtaccatggtctcggccatggcgccgaggccggcgcggtggctgtccacgccggacattagcatggcacgggtgggcgagcaggtcggtgcgacgtagaactgcgtcatgcgcacgccctgacgtgccagcgcgtcgaggttaggcgtatggatttccccgccaaaggcccagatgtcggaatacccgaggtcatcggccaagatcagcaggatattcggccgctggtccgcaccgcgcggagccgagtccgccgcggacgccacgctgaggatgctagtcgccagcacacccgccagcagaatgactgcaccttttactgttgtcacctcctgattccggaacgtcgtcggctcaatgcgctccggcaccgcgagcatcgcgccgctgcagcaaatccagcgccacatcaacgatcatatcctcctgcccgcctaccatgcgccgcttgcccagctcgatcaggatgtcgaacgccgacagcccatacctctgcgcggcaacttcggtatggcgcaggaagctcgaatacacgcccgcatagccaagcgccagcgtctcgcggtccacccgcaccgggcgttcctgcagtggacgcacgatgtcctccgccgcatcgatcagcgtcttgacgtcgcagccgtggttcagtcccatgcgatccgccgtggcgatgaacacctccagcggcgcgttgcccgcgcccgcgcccatgccggtcaggctggcgtcgatgcggtcgcagccatgctcgagcgccacgatcgagttggccacgccgagcgacaggttgtggtgggcgtgcatgcccgtctgcgtctcgggcttcagcacatccctgaatgccttgaagcggtcggcaacgtcgtacatgttcagcgcgccgccggagtccaccacgtacacgcattgcgccccatagctctccatgcgcattgcctgttcggccaagtgccgtggcgtggtcatgtgactcatcatcaggaagccgacggtgtccatgcccaggtgacgcgcgtactcaatgtgctgcttcgagatgtcggcttcggtgcagtgcgtggccacccgcacgatgcgggcgccagcttcgtaggcctgcttcaggtcatggatggtgccgatgcctgggagcagcagcgtggccactttcgcgtgcttcagcacatcagccaccgccgcgatccattcgaggtcggtgtgggcgccgaagccatagttgaagcttgaaccctgcaggccgtcgccgtgggcgacttcgatgctgtcgacgccggcgacatccagcgcacgcgcaatgcgcacggcctgttccagcgagtactgatggcggatggcgtgcatgccgtcgcgcagcgtgacgtcggagacgtagatcttcttggtcttgtcgaacatgggaattcctccggggatcacaggccgagcctcgcggcggccagccggtccgcggccgccagcgccgcgctggtcatgatgtcgagattgccggcataggccgggaggtagtgcgccgcgccttcgacctccaggaagatcgacaccttcaggccggcctgccgaccgatgcccggcaggttcagcgcccgctccacctcatagcgctcgaactgtacggcctgcttcaggcggtagcccggcacgtactcggctacgctggccgccatgtcgcgcaccgagtcacggatcgcgtcctggtcggcgtcgagctcggccaggcagtagaccgtgtcgcgcatgatgagcggcggctcggccgggttcagcacgatgatggccttgccgtggcgcgctccgccgacttcgacgatggcccgggaagtcgtctcggtgaactcgtcgatgttggcgcgcgtaccgggaccggccgacttgctggcaatggacgcaacaatctccgcgtaatggaccggggcgacgcgggagacagcgcgcaccatcgggatggtcgcctgcccgccgcaggtgaccatgttgatgttcggggcatccagatgcgcgtcaaggttgacgactgggatgacatagggaccgatggccgctggtgtcaggtcgatcacgcgcacgccgcgctcctgcagcagcgcgttgttgcgcgcatgcgcgccagcggaagtggcgtcgaaggcgatgccgatgtctcagctggctcggaagtgaagggactatctccgaattctatgggtcaggttcgttgcccggtagttagcgcccggcaggcgctagcgatcgcttagcgtgcaaaattttccgttttctgaagcgaccccatgacctgcgtatcgctggcctgtcgtgccgttcatcaagctggttcgacggggtgccgctcgtgcacgtcggcaagcaccgccttgaagacgatctcaataagctgctccggaaaggccagcctcgatacgccgatcagattgctggcgcactgaggccgcgccatggcgtaggcttctttgcgcaccttgcccgctactgcaaacgcctcatcgacatcgaggacatagagcgtctcttccaccacgtggtcgagcgtggctccgaactgtgcgaggatcgttgcagcgtttgcataggtcacccgcatctgctccgccatcatcgagaagtcggctggcttgccggttccatcgagcgcagcaggcgcgatcatgacgcccttgtcgtcgtggctgagctggccggacacatagatcatgtttccgatcttgattgcctgtgcatagccgtagtcgtcttccgccggcacaccgtgataggcagcctctttgccattcaacgccgtcgtgttggtcatatctgatctcctgttgaataagccggcccggatgtccgggccatttgttcacctcatgacttctgagcgttgggccatgagccctggacagatgccagaaggagagaaagcgatgcagccagcagaacgagatccttaagaaggaactggccaggcatagctgaaatggccggaaatccacccgccgtcgcttctgctacgccgggggtagtcaagaaaaacgtgagcgtgatcagataggtcgcagccgacatcgccgctcccaatgcggagaaaatgggctggaaggctccgagaatcagagccgctgcggtcgacagctcaagtacacctataacgtaacttgtcccttgaactccgaatagggcgtgcaaccagctcatgatggggctgttggcgatgaacggagcgatgccgttggcttcgtaagcggtgaatttcattccaccgaaccaaagaaagatgacgaccagcgcccatctgagtagggcctgaagagagagcgatccaacgctcttttcagcgatttgtagacgaaactgatttgcacgagtggtcattggggtttcccattcaagttgttcatcgggtggttaggagcctccactgtaggcccaccagatatcgatctcgagactacctttgctcaataaaatgcccacaaggatcaaaataacgaggcaatccatcccaaaaacggcggcacagcgcagcacgccgcaaatcgtctcgtcgagatcgaggttcaggtacttgcagatataggcaagcgcttcgtggattgtctgcccgaacgaaacgcaacgacaacgacattccagttcgccacggctctgggatagtcgctactgggcgtgcatgtcggaccgcgcgtcattgctaaagccagacgcgaacgagctccgctcgaaggaatggcctgccttgcgccggcgcgtctagcgccacatcgaagctgcacacggaaagcgaagcgcattactcagcttcgcgcgccaggcggcgccattgccccggcgtcatccccatcttgtcggtgaacacacgccggaatgccgatacggatcgatacccgactaagtcggccacggcctcagtggtcatcgccggcttcttcagctcgttggcggccaggctcatccggatatcggtcagcagttcgttggccgagcgccccagattggcctgaaagtgccgcatgaaggtggcgcgtgacatgctgcacaagtcggccagatcagacaggttccagggtcgcgccggatcggcgaacatggctgaaatggccggggccagtcgtggatggccggcaagcgccaacaagcctgccggggcctgttcggattcgctcgccgcgcgcagtaccagtgtgaacagcgcgaagctaagcgcgttgagcatggcgtatccgcccggtttgtcgccggtggactccatgcgcatcagacccacgagactggccaggtggttcgaagcggacacgatgccctcttcaccacggcggtccatggcctgtaccacgagagtcgtgggtagataatcgcgaatcagccgatcatggggcggcccgatgaaaaatcgcccgcacaacatgtccagatgctcgccctggccatcattctcgctgagcgtccatcctgcagaaccttgacgattgtaggtaagacccggcgcatgtccgctgccatcgtgcagcacgtgcgccgacccgtgaggcaacagcacgatatctccaccaactagctccctgaccttccccgtctccggatcctcaataatggcccggcccttgagcacgacgtggtagggaatctcgtgcgccgcggactgatcccaggccacacgccatggcgcaccgtagacgcagcggacctccagccggccagtgatgttgatcatttgcaggagatggctcagccagtcgacttgggacataggacctcgggaacttgaaacgctcaagcgtcttattgcggttgcacaccggttgtacgcaccacatggccccagtgcaagagctgatcggacacgttgcgcaccgggcgggctgctcgattgcaaccatctatcgcgacctagcccggatcacgaacgatagcgatgcgccgaacgagacctgaggacagtacccgctcagcgggttaggctaatagctttcggtactggatgaaaccggagcgatcagcgatgcggtcgtaaagctgcatgccgttatggttggattcgtgtgtcagccagtgcacacgggacgccccgcgacgtttcgcttccgcatagacatgctcgatcagcgagcgaccgatgccgccgccacgcgcattgtcagcaacaaacaggtcttgaagatagcagtagtcgcccgtcgtccaggcagatcgatggtagattgaatgcaccagccccaatggttgttcgcccaccatggcaagcgctgcatgcatcggttcgcctgggtccaagaagcgcctccaggtattgagcgtcacggactcggggatatccacttcgtaaaatcgctgatagcctttccacagcggaagccacatatcaaaatcgtagttatcaacggctttgatctcgactgattgcatagaatattccagaaataaaagatgtgcattcatgcactggccgtcatctctggcgggcagtagtcgctgcgtgaatgttgcgcccgtctttggcccgtgcatattggtaactaccgttcgctgcaacgtctacgcagctcgtggggccgcagagaccttccctcgccgggcttctggctaggccgccgtcacttccagcccgcgctgcaccgccggacgcgcgaggccgcgatcgagccacatctgcacatgaagaaagcggtcgaagccaacaatctcgcgcgcttcgtaaaagccgatcaggttacgcacccaaccaagcagcgaaatgtcggcgatgctatagtcagcgcccatcacccagtcgcggcccgcgagccgttcgtcgaggacaccgagcagccgcgcggattcgtttgcgtagcggtcgcgcgggcgcttgtcctcataggctttgccggcgaatttgttgaagaagccaacctggccgaacatcggtccgacaccgcccatctgccacatcagccactggatcgtttcgtagcgcgtgcggggatcggtggagaggaactgccccgtcttgtcggcgagatagatcaggatcgctcccgattcgaacaaggccagcggccgtccgctcggaccgtgaggatcgtagatcgcaggaatcttgccattggggttgagcgcgaggaaggccgaatcgtggttctcattcgccatgatgtcgatgcggtgcgcctcataggcgaggcctgtctcctccagcatgatgccgaccttcactccgttgggcgtcggtaaggaaaagagctggagccgatcggggtactgcaccggccagcgcgtgaaaattggatgattgagtgtcactttcttcctcctagactcgtcggtacatacgaagagcctggacacgtttccaagattctttcttgggtgcgtccaggctctggcgttacgctcgcatcagatgacaccttccaggaccctcggagagggtcgatgcggccggataaagttcagatcgagccagccggcgtgacggcaggaaagtccttctcggggtcgaacacgttgttgaaaaaattcgtcagggagtacatggccaccagcgcgacgatctccatgacgttcgcatccgtgtagccggcatcgcggacggctttcagatcggcatcgctgacgttgccccgggcctcgatgactttgcgcgcaaactggagggcggcgtcgcgcttcgggtcgctggcgtgacccttccgagcgagaatgatttcctcggccgacagcttggccatatgctcggccgtaaagctgtgaactgtcaggcagtagttgcagccattcacttcggagacagcgaggccgatgccgtcacgcgtcttcacgtcgagcgccttgctcaaggagccgagcagagtggcccatgcgttgaacgcaatcgggctctgcgcgaagctcgccatcatgtttggggtgaacccaatgttcttggtgaacgcatcgagagtcggtttcgaatcggccggtacctgctccggctttagagctacagttcttgccatcataatctccgtgagttacacgttttgctaattggggaaagtccatgtgggaaccattcctcggcttacttcgtacccaagtcttgggtcgaagctggtcatgccttcaagtaggaggtaccttgcggccgcctctcacttgaaggtcgcttagtcgttcggcgcgatcactgccgccgggacgcacctataccaaatccaacacatcgtccaccggacggcgcggcttctgcgcccagtttcccgggcgctctgccccgatggacaacagcatgactggcacttcgtttgcagccagtccgaactcgcggtgcaccgcttcggcatcgaaaccgatcatcggcgtcgaacccaggcccagcgagcgggccgcatagatcatcgccgccgcgccgaaggtgccagtgcgtacggcctcgtcgcgctggcgctgcgggtagtgcatgtacagatcgcgtgcggggatttcccattcagccaccatcgtttccggcataacgcctgcttcaaccaacggagccaggcgctccggtattacgctggaatcggccaattggccgcagacgatgaaggtaacggcggcatcggtgatcgcaggttgattccaggcgatcggactcagccgagccttggcttcacgtgtgcgcacggcgatgaagcgccagttctgcaagtggaaggatgtcggcgcggcggtgccgattcgcaccagctcgcggatttggtcgtcattcaagatggcggcagggtcgtaatacttggcggcgctgcggctcaagatacattcgatgacagcattggttttggtagtttcgttgggcatagcggtggcgccggtggcggactcgatggcgggaatagcgatacggctcatggtgcgaccctttcatcaggtggttaggagcctccactttaggcgtacccgataccgatttcgagactacctttgctcaataaaatgcccaaaaggatcaaaacaacgaggcgccccatcatccactttcggcgcggcaatgaagagcgacgtttgcggtacggttcccgaatggggtcatgcagcagcggtactcgcacatgacgtaccaggccggcaccccgcggtgattggcaccgccgaagcccggtacgccaccgatttcctcgacgacctggagtctttcaccgtgcccgagctgggcatccaatggtgacgaggaccagagtgcgccggtggaagtcactgggcgtgagtcggcacgctaaggttacgagccgggggcaattggacatcgtcagcacagtcaacggctggtacatcgggaacattctgtttggcggcgtaattggcttgctggccgttgacccggctacaggtgctatgtattcgttcccggattccgtcaacgcgacgttgaatgtttcggagaagacggtcgctggttcagcgcaatccttgaccatcgtctcgacggaaagcatgacgcccgaagccatgaagaatgcccgctaggtcgttgcgccgaagtaaatcgcttcgcgctgttgtccggtaatgccggcacaaggtggcggcgtttttttggaaatagggagcatcaccggtggggcctgctgcacggggacataagtgcagaagcgctccgcccgaatgcgcagaggcagactcggatcgaagggctgttcggggtcggcaagagccactgacaaccgggttgaatccttgcaacgagaagtgcgcaaaacggcgcctgcattgcagtccagctatttccggttcctcacagcaacacttggtggtgcccgggaattcgtcaggacttgtcaggggactccgtcgccgctcgcgggtctgagaacggcaattttacgacctggtcctgacgcgaaatgtgtgaggtccccctactttggaaacaaccggttcttaggcgtaataataactgcgcgttatcgtgccctatcgcaacgtcccgactcgccggcctcatgttctttctgacccccgtgccaaggcaacggttactgacaggaatggcggatgcgcaacggcagtagccggctgtggattcaaccggtctccgatcgccgatgacagaatggccgatgagcggtcgtccgatgcaacagagagcgatagccgcaaccaatccaaagcagtcgtctgcaagccgtagtgtgacaatcacggttggtggtgaaagtttgtcactacaggatgaagccgcacgcgctgccacgttgctgccagccggcaaggatcgcccgggtgctgaagttgcgatcggcgatccacaactcgccaggctgggccgattcgagatcgttgcgctgtatccaagtaagcggccagttgccccatcttgaatcgattgaagcgatgaagcatcgtccccacgaaggaggatcgtggatacgatggatcaagtgtcgacagttgagcggccgcaccggcgggagtacagcgccgaattcaaggccatggttctggagcaggttcgccagccaggtgcttcgatggcgggggtcgcgctcagccacgcgctgaacccgaacatggtgcaccgatggatgcgcgaggaccgtcagcggcagatgctgacggcgctgagcgagggccacgcgtttgttccgctacagatgaacgctctgtcccctgtcacgggggaggtgctaccgtgtaagacgccggcggcggcaacgcccgagaccatccgcatggagatacagcacgcaggcggcacgctggttgtgcactggcctctgtcagcggcccagcagtttgcccaactgcttcgggactggttgcgatgatccgcattgacgcgccatggttggcggtcgagcccatcgacatgcgtgccggaagcgagcggttgctggcccgcgtggtgcaggtcttcggcgcagcccaggctcataggcgtcggtacgacgagctgctacggaaccagcgcggcagcacggtcgcgccagaggcgctgcgtcgcattgcgcagatctaccgccttgagcgcgagctcgcctccctcagcagcgaacaacgtctggtcagaaggtacagcgacgccaagccgttgtgggaggaactgcatgcctggctgcagctggagcggtcacgtgtacccgatggtggcatcacggccaaggcgctcgactacagcctcaagaactgggcggcgctgacgcaccacctcctcgatggggaggtcagcgtggacaacaacagcctggaaaaaaaaggttcaacgaggaattccggggaacgccgccttgatctttaggaagaagtattcctcgtcacggtagccgtaggctcggcgcttgatgactttgatggtgttgttgatgccctcaacgacgcttgtgttcagcgggtgccggcatcgagcgatgatgccgtaccaataggtctgcaagcgctgcgcgaacaactgcagggctggaatccggctctgccttgcctgggcgcaccaatgctcccaagccttctgggcccatgcgggacggcggtagaaccacagccgcttgagttcgtccttcaggatgtagacggtcagcaacggttgattggcctgcagcacgtcattcaaatgcacggcttgagtgtcgctcaggttttccttgttgcgcagcagcagccagcgcgtggatttgagtacccgtctggctggacggtcgtgccgcaggcgattggcttggtccacacggacccggtcgatcacctcgcgcccatacttggctaccacgtggaagaggtcgaagaccacctcagcctgcgggcgatgctcccggatctccagttcataggcagttgtcatgtcgatggcaacggcttcgatgcgcttggctactcccgccgggagctgctcaaagaaggcccgtgctgtctcgcgcgagcggccctgaccgatccagagcacttgccgcccgatcggatcgacgacgaccgtggcatagcgatggcccttgtgcagcgcgaattcgtccatggccaggtacgcagtagctgaccgcaagcctgagctagacgggccgtgacacgctggtagcggccaagccattccaagcgttccaggcgcgggccaccgcattggtcgcaccacacccggcgccggggaacgtgcagcacgacccggtactcgaacagcggaagatcccgcacgcgccgcaccaccgtctcatggacctgccggcacttcgacccgcattcctcgcagtacatgactttgctgaccggcttgaggtacagcgctagcgtcggctttccccttcaggccacaccacccgttccagcttgtagccatcccagcagcccaacgcctgtagcgttttccgatccagcatcccgttccctaatcgccgtcttaacggccattaggatacggaatgtggcaattcagtccccggaattcttcgaagaaccaaaaatgaggcgagcactgccttcgtggcgcccgttttgtatcgcaatgtgtcagccgttagcgcgaacacatgcgcttacgaaaaccccgcctggccgatacatcgctaacacgtcacgctgctcaaatggcgttaccggatgccggtaatcgccctgtcacgcatcagctcacttacgcatgctcccgggcatgaaaggacttccaaatgaaaacgactcgattcatggcgacggcgttgctggtcgtcggtagcagcatcgcgatgcaagcggcccaggcgcaggccgtgggtatccatcgcacggacctgctgaagcaggacatcagcgtgcccggacgcgaggccgtccaggtgcgagtcgacttcgattcgggcgcgtttgccccgaagcactctcatccgggcgaagaagtcgcctttgttctcgaaggcacgctggagtaccagctcggggaccagccgccggtcacgctcaaggccggcgacagcttgttcatcccttcgggaacggctcactcggcaaggaatgtcggcaccggcaaggcggcggaactcgctacctatattgtcaagaaaggggctccgctggccgtaccgagcaagtgagcgcgacctgaatgcaccgcgatattgaaaaccagagctcaagaagtgcgaccatgagtgcatcggaatctcccaacgctaccgtcctgtcccgccgggccttgttgctgagcggcgtggcggcggccgcccttgcggcatttcgtccggtaacggctgctacccggtccgatgcggcgcaggccgccggggcacaggccgctgccgcagatgccatccgcccgttccgcgtcaatgttccgcaagccgcgcttaccgacctgcgccgccgcctggccgcgacgcggtggcccgacgccgagacggtcagtgatcgctcccatggcgtgcagctcacgaagctccagccgcttgtgcgctactggcagacgggctacgactggcgcaaggccgaggcgaagctaaatgccttgccgcagttcctgaccaatatcgacggcttggatattcatttcatccacgtgcgctcccgtcatcccaacgcattgccgctgatcatgacccacggctggccgggttcggtgttcgagttgctgaaggtgatcggtccgctgaccgatccgacggcgcacggcggcactgccgacgatgccttccacctggtgctgccttccctgcctggcttcggcttttcggagaagcccaagggcaccggctggaatccggaccggatcggccgcgcctggggcgtcctgatgaagcgcctgggatattcgcgctacgtctcgcaaggcggcgactggggcgccatcatttccgatgccatgggccgccaggcgcctgcgggcctgctcggtatccacgtcaaccggatcgagcgcgcgaccacgctcccgccggaaattgccagggcgctcaagagcggcgatcctgccccggagggcctgactgccgaagatcaggcggtattcgaccaagcgcgggagttcctcaacaaaggcttcggctacgccgccatcatggggacgcgcccgcaaacactgggctacagcctctctgactcgcccgtgggactggcggcgtggatctatgacaagatcgccgactgggtctacacccgaggcgacccggagcgcgcgctgacccgcgacgaactgctcgacaacatcacgctctactggctgaccaacaccgggccgtcgagcgggcgcatctacgcggagagtaatcctggcgcggccagcgggaccggcatctcgatccccgctgccgtaacaatcttccccggcgaggtctacaggccgccgaagcactgggcagcacggacctatcgcaacctggtctactacaaccgcgtagacaagggcggccacttcgcggcctgggaagagccggggctgttcagcgccgaggtgcgcgccgcgttccggtccctgcgctgagcgcggcgctcaccccagcacggcgcgcgcgatcacggtgcgctggatctcggacgagccctcgtagatgcgcagcatgcgggcatcgcgcaccagccgctcggccacgtccaggcggctgttgtcgagcaccttcattgccgtgcggaagccgctgccttccggtcccagccggttggcggccagcacgaaggcgctgatgcccgcgtgccggcggccggatccgtcttggcgtagaccacgatgaagtccgccgcgtccgcgttggagatgaagtgcttgacgccgcgcaggcgataaccgtcgccctccggcgtggcgcgcgtggccatgtcggcggggttggagccggcgcgcggctcggtcagcgcgaaggcgcccagcttcgtgcccgacgccgtttccggcaggtagtgctcgcgcagcccgtcgtcgccgccgatcaggatggaatcggtggccaggtagtgcgcgccgatcatcgacgaggtcgaggcgcaggccctggcgacctcggccagcgacaggatcaggcgaccggcgaggtttcggtcccgccccaacgctcaggcaggttcatgcccatcaggccgagttcggcgagctggggaacgtagcgggtggtggaggtttcgtcgcgatccacttcggccgccttcggcgccagttcgctctgtgcgaaacggctgatcgcgtccgcgatttccagatcgcccggctcgacacccaagcgcctatgcatgttgcttctccgtgttgaaaatatgcgtttgcaatgtttcggcggccatcgccgcggcacccagcgcgccgctggcccacaattgcccggcctgcgcagaggcgatacccagttcgcccaggatggcctcggtgtgctgcctcaacgccggcgcaggcgtcacgcggttggcgccatagcctgagaacttcaccggctgcgatggcagccgcacggtgccaccgtccggctcgcgcacttcggtcagcaggccgcgatgggcggcatgctcgctttctagtgcctccttcacattgcggatgggcgcaaccggaatgcccgccgcgcccagcagcccgttcacctcggcctgcaggcctggcggcgccgtaccctgcaggggcgcccggattgcgttgcggtgacacgattctgtgcggcatatttcttaatgcgcacctcgctgcggctgttgcgctacttcgtcgcgaccgcggaatcgttcagcaccacggcggcggtgcggcagttgaacgtctcccagccctccatctccgtcgccatccgcgaactggagacgctgttcgaggaagcgctgtttccgcgcgacgcgggcgcgaagatgaccctgacccacttcggcgtgcgcaagctcgccgaagcgcgccacatcctcggcgcggccatggcgttcgaagtcgacaagagcggcgatgccaccgccggcgaggtccggatcggcgtcttccgcacgctggcgccgacctacctgccgctggtgctgcgcatcgcgcgcgagcgctatccctggcttttcggtgcgcttcgtcgagggcgacctggcccagcttgaagactggctgcacggcgggcagatcaagctggcgctaacctacgacgtcggcctgcccaatgaaatcgaccgcgaggtcatggcggaactcaggccctacgggctggtgcctgccggttcacgactggcgcggcacaagggtgggatatcgttgcacgaactggcgcgggagccgctgatcctgatcgatctgccgcacagccgtgaattcctgatggcgccgttctggcaatttggactgcagccagaggtgcgctaccgcgtgacgtcgctggagctggcgcggagcatggtggcgaatgggctgggagtggcgctgctgattacgcaggcgccagcgtcaggccagggcgcaagcgtggcggagcggccgattctggaggagacggtgcggcagccgctggtgatcgcgcgggcgagtgccacgacccggacgcgggcttcggagtcgctggcggaatgcgtgcgggacgcggtcggtgaggcgatggcggcgcgggcaaggcccgttcaacgcaagcgtgcggatggcggggaacggtgatggcccgagggtcggaagccgctagccggtacagctggctgaagtcgtttggcgacgaagcctaagagaccatttcgctaaagaccccagggggctgttagccttggccatctgaacaaccggaaccgaggggatgagcgcgccgatcattgacgacaagctgtgggcactgatcgagcctttgctgccgccgtcgaaaccgcgacgcgagaaatatccaggcggcgcccggtttcgaatcgggcggcgctgaatggcatcctgttcgtgttcaagaccggaatacgctggtgcgacctgtcgaccaagttgggatttggctctggttcgacctgctggcggcgcttgcgcgactggcagaaggccggcgtgtgggaccgactgcacaagctgggctcgcgaagttacacgagaccggccaactcgatttctcacgagcagccgtcgattcatcgttggtgcgagccgttggggcgggcgaaaaactggcccgaaccccacggatcgctcgcgacccggttccaagcatcacatcctcgtcgatgcgaatggcgtccccatcagtgcaatcctgaccggcgcgaaccgcaacgacgtcagccaattgctgccgctcgtcatgccattccgccgattcgcggcgtacgccgaccgcggctacgactccgaaccgcatcgtcagcggctgcgtgagcgcggcgtcaaaccagtaatcgccaagcgccgcacagaacatggcagtggactgggcaaattccgctgggttgtcgaacgtactcctgcgtgacttcacaacttccgtcgtcttcgcattcgcttcgaacgtcgagctgacattcatgaggaccctcctcaaactcggctgctctctcgtctgctggaacatcttcaggcgcgctgagccgtctttttgaaacggtctcttaatgttcgcgccggacataccggccccggtaaggaacacaacggcggcaaccactgttggtccgccatggcaacaatcgcctggcacgagggcgtcctgacactatccgccagtgccttcggcccgtatcgagggtggggtccgggccgcccgccggccgcccggacccggatcaggtgcctgggtcagaccaggttgatctcgacgtcgaggttgccgcgcgtgaccttggagtaagggcagttcagatgcgcggtgtccaccagcgcccgggcggtctccgtgtccacgcccggcaggctcacgttgagccgggcgcgcaggaagtaggcgccctcactgttggccaggtcgacttcggcgtcgaccgccagatccggcggcagtgcgatcttgctggcgcgggccgcgaagccgatcgcactgatgaagcaggcggaccaacctgcggcgaacagctgctcggggttggtgccgctgccgctgctgccaggtgacgacagtcttacgtccagtcggccgtcatcgctgcgggcggcgccgtcgcgtccgccggtggtgtgcgtcttgccggtatagagggtttgtccggattgggtcatggttggctccagaagactgatggaagttgcatcccgcgcgcccctgcggcgggatccatggatttaaggcgactcatgtatccgggctgtggcgtgcagagtgcggatttgcatatgtacgtatcccgcaggcttgccgatacaaagggatacaaaaggctgccaggcagtggatttgttcctggcagtaccaattgttgttcttgccgatgcctttatccggggccaacggtcgaatagagttagtcgcgtgggcaccggccattgcctgcggcgcgggctgccggggccggcgccatcggtgccctttccattcccttcttcgccaatttgcctccgtgcctgattggcatggaagcttgcggcggagcccaccactgggcgcgcaagctgcaggcatttagtcacaccgtcaagctgatggcgccacagttcgtcaagccctacgtcaagaccaataagaacgacgcggccgatgccgaggcgatctgcgaagcggtcgcgcggcccaacatgcgcttcgtgcctcttaagaacgtcgagcagcaggccgtgctggcgctgcatcgggtgcgccagggcttcgtcggtgcacgcaccgcccaggccaaccacatccgcggcctgctggccgagttcggtctcgtcgtgccgcagggcctgacccacgttctcggccgtgtgcgcgaactcatcgaagacgccaccaatgagctgccaggtagcttccggttgttgattcaggctgccgccgtggcgattgcgccgcgcgccgtctgcccgttgattatccaatgatcattaaacgccacccccgaaatgaaggcgttgcgcgccgcgcaacgctgacttgcttgctgccgtgattcaaattgcccccggcggcccctaatctttggacaccgcaacctgacacccaaagccatggaaaccacagcctcccccacccagcatggccccgcccatgcgaccgcgccgatgtccggcgcgctggtcgccctgtttgcgctgtgcgccggcgtgctggtcgccaatctctactacgctcagccgatcatcgagctgattgccccggcggtcggcctgtccgcccagagcgccagcgtgatcgtgtcgctgacacagatcggctatgccgtcgggctgttctcttcggctggcgcgccgtcttctacatcgccgccgcgatgacgctggccacggtggcgatcatcgtcacgacactgccgcgccgcgagccgcaacatcgtgctacgcgttcaggcgtccgcggctggcggcattgagcgcgtgccggcggcgcggtgggctccgcactggccagcacgctctacacgcatctcggctggtccggcatcgtcgccgccggcagtggtcttggcctggtctcgctggcggcgctggaactggcttcgcgccgctgagaccgtgtctcttcgaaatccgtcaacaggagtcgctgtcatgacatcccatctgttcgctcccatcaccatcggggccctgcaactgaaccaccgcgtggccatggcgcccctgacgcgctcgcgcgccggccagccgggcaacgtgcccagcgccatgaatgtggagtactaccggcaacgtgcgtcggcagcgctgatcattaccgaggcctcgcaggtttcccaacaggggcaaggctatgcctggacgcccggcatccatagcgccgagcagatcgagggctggcgcgcagtggcggaggccgtgcatgccgaaggcggccggatcttcctgcagctctggcatgtcggccgcgtttcgcacccgtcgttccagcccggcggcgccctgcccgtggcgccgagcgcgctgcccgtgccgggcaagaccttcatcgtcgacgcggacggcaacggcgtgtggagcgagatcccgacaccgcaggcattgagtgcggcagcgattgcggccatcgtgcaggactaccggcgggccgcgcgcaatgcgatcgacgcgggcgtggatggcgtcgagatccatgcgggcaacggctacctgctggaccagttcatcaattcggaaagcaaccaccgcaccgacgcctatggcggcagcatcgagaaccgcgcccgcttcctgctggtggtggtggacgccgcggccgaggaaatcggggcggagcgcgtgggcgtacgcctcacaccgatgggacgcttcatgggcatgggcgatgacacgccggaggccacctttggctacatcgcgcaacgcctcaatgactggccgctggcgtacttgcacctggtcgagccggccatggtcgggaccgtcaaggacgaggccgctgatccgcgctgggacggcatgattctcgcgatgcgggcggcataccgcggcgtcctgatgctggcaggcgggtacgatggcaagtccgcggagcaggcgatcgccgacggccgcgccgacatcatcgcgttcggccgaccgttcatcgccaatcctgacctgccccgtcgcctcagggtccaggcatcgctgaacgcgccggatgccgccacgttcttcggtggcacggctgtcggctacaccgactatccggcgctggcctgagccagaccgcggcaacgccaggccttaccgggtccggctttgctgctgccagccatgcggcgcccggcaatgacatctcaggcggcatcgcgcccggcaggaccaccggcgcgcgtcatcgccacctgccagcggggcggggagccgatgctctggagcaggtgcgcggaaaatgccttgagcttggccggcggacgcggcgcggcccgcaccagatggatgccgccttgcgcctgcggtaacacgccctccagcagcagttccaccaggcggcccgcaccgatatcctcgccgaccgaccagtccggcatcagcgcaatcccgagcccctgcaacaccgacagccggcgcgcatcgcaatcatcacactccatggcgaacgcggcactcgcggcatgagccggcctgagtacttctcgccacccacgcatgctggtactgtgggcgcggtcgatcagacggtgatgggcgagctcttcggcatgcaagggacggccgtgcgcctggagataggccggcgttgcacagacgatatagcgctggctggcgatgcgccgggcaatcaggctgctgtcggcctgctgtccgacgcggatgaccacgtcgaagcgctccagcaccggatccacgacgcggtcggtcagctccagctccacggtcagccccggatactgcgcatacaggctgccaagatgcggcaccacatggcgtcgcgcgaaggccggcaggcaggcaacccgcagcctgccactgacgccctgttccagcgccgtcacggcgtcgcgcgtttcgttcagttcctgcaggatgcgcgtggcgcgctcgaacagcaggtctccggcctcggtgcgcaccagcgcgcgcgtggagcgcgtgaacagcgcaacgcccatttcgcgctcgagggcatcgatctggcgcgctaccgacgacgccacctgtcccttgcgcctggcgaccgccgaaaagctgccggcgcgcgccacgtcgacgaaggtggccaggttctcggcaaaacggacaaattccatttgtgcatttcccgcaaaggcgttgcgcggaagcaaaggcttcccgttgcaacaaccagcgcatagtatcgggacgatgcgctgcggtgcaaggctttttgcaggaaatgcaaagcagaagcatcatgtcatttgctaaaccgacaagccgacacgaacgatcataaaggtaccgaccatggagataagttccaagatgactactgccctggccccccttttccatgcggcgcgggcgcgcgcgcaaacatccgccgcgctggtgctgacgcttgcctgcacgctggcgccgggcttcgcgcgggcggaagcatggcccgccaagccggtcacgatcgtcgtcccctatgccgcgggcggcaccgtcgacaaggtcgcgcggcaggtccaggagggcctgcgcaagcagctggcgcagacggtggtgatcgacaaccgcgcaggcgcgggcggcaccatcggcacggggcagatcgcgcgcagcgcgccggacggctacaccgtcggcatggtgttcgacagctttgccaccgagccgcatttctacccgaagctgccctatgcctcgcaccgcgacctgacaggcgtttcctatatggtgcgctcgccgatggtgctggtcgtacccgccgcctcgccctacaagaccgtgcaggactacgtgacggcggcacgcgtgccgaacaaggtgtcctacgcatcggtgggcaacggcagctcgaaccagctcgtggccgaagccttccacgaggccgccggcaccagcggcatccataccccctacaagggcggcggcccggccatcaatgacctgctcggcggccacgtcgactcgatgatcgcgagcctgccgctggtgctgccctatgtgcagtcgggcaagctgcgcgcgctggccgtgacctcgcgccagcgtgacgcgaggctgccggctgtccccgcggtagccgagtcctacaagggcttcgaggcctattcgtgggtcgggatgatcgcgccggccaagaccccgccggaagtgctggggaaactgaccaccgccatgacgtcgacgctgcgcaatccggcgatcgcgaaactgctgaccgacggcggcttcgacgtggtggccggcgacgcacaacagaccaacaagctgatccaggacgaatcggcacgctggggccggctaatcaaggcgcgcaacatcgcggtcgactgagcgcgcgctgctggcctaaaccctttatcaacttcctgacaggcatttcgcgatggttcctttcgcctaccagacccgtccgcaacgtgtcgtcttcggccccggcagcctggcgcggcttggcgaggaagccgatgccctcggcgcgcgcagcgcgctggtgctgtgcacgcccggccagcgcaagcttgccgaacgcgcggtggcggtgctgggcacgcgcagcgccgggattttcgacggcgccgtgatgcacgtgccgatcgagcaagcgcgcctggcgcacgagcacgccgcgcggcttggtgccgactgcgctgtcgccattggcggcggctcgaccatcgggctggcaaaggccatcgcactggagtcggaactgccggtcatcgctgtgccgacgacctacgccgggtcggaaatgacgccgatctatggtctgaccgatgccggcctgaagcgcacggggcgcgacccgcgcgtgctgccacgaaccatcctctacgatccggacctctcgctgggcctgcccgtcccgatcagcgtgaccagtggtatgaatgccatcgcccatgcggcggaggggctctatgcctccgaccgcaacccggtgagccagtggatgtcacgcgaaggcattgcagcgttcggccgggcactgccggtcattgccgcagcggagcagcacaccgacgaggcgcggcgcgaagcccgcagcgacgcgctctacggcgcctggctgtgcggggccgtgctcggcagcgtgacggccggtctgcatcacaagctttgccacacactgggcgggaccttcaacctgccgcacgccgaggtccacacggtggtgctcccccatgcgctggcgtacaacgcgcctgccgcgccggaggcaatggccgccattgcacaggcactgggtgccgggcacggcagcggtccgctcgccgtgttcgaactggcggcgaagctcggtgcgcccacgtcgctgcgtgaactgggactgtcgtcggaagacctcgatcgcgcctgcgagctggcgctgcgcgaccagtatccgaatccgcgtccgctcgaacgcgaggggatccgccagctgctggaagacgcattcgccggaacagcgccgtcggcctgaacggcagcggccggggctgccgcatcgaacggacaacaccgccacggtcgccagccgtgctcaggcgtgcgcgatacccatgatccggttgcccatgccaatgccccacgccgtcattctcgcgccctccgccaggcggtcctgctgccaggccgacagcgcggcgtccagatcctgcccacgcgcctgcgcgacggcaagcgcgagagccacggcgtcgccggccgcctttgccgtgctgcccgcggtgtgcggccgcggcacaaaggccgcgtcgcctgtcagcacgacgcggccgaaccgcatgccgggcacctgcaggtcctggatcttctggacgaagatttccgtggtgttctcgatcaacgcctggaacgcagggtttgcatgcgcggcgcccatccggcgaatccagcgctcctgcccgggccccagcgaacccggaggcacggactggttgcgcaacgtgccgttgcggtccgtcaggacctgctcgagcttggtgccaggctccgccttcaggtaccacagccagttgaagcggcggtgacccggctcggtcgaaccgtcgacccccggcaccatgtactgcagcatcatcgagccaggttcgtgctggaacacgaagttctcgtagagcagcggcctggcgctatcgggcaggcgttcctcctcgaccagtccgcgccagaccacatagccggcataggtcggcgagatacccggcagcacgagcgatcggaccgtggagccggccccgtcggcgccgaccagcaagtcgccttgcgcctgccggccatcggcaaacgtggcatgcacgccgaagccgtcctgcccgacgccggtcagccgcgctccgcgatgatagtgctcggccgggaagctgcgcagcaatgccgcgtacaacgtgttccacgacgtctgagtctggggcgaatgctgccggtcgcgaaccgtgccgcgggaatccaggtacagccggtcgtgcgagcgcacgccaagcgcgccgcccgggacgacgccggcaaaggcaaaggcgcgtatcacctcgggctgaagcacgatcccgccaccgcggctgctcagcgcggagggcgaacgctcgaacacctccacattccaaccgaccgcgcgcagcgcggttgccgcgaacaagccgccgagcgagccgccgatgacgagtgccctgggcgggcgcgccagtgccgccgggtccggcgcgacagatgccgatggttctgcatcaagggaaagattgccttccatgtctggctccaatatgcggtccgatgtgcgatccgatgcagccatggtagagggccgtgcgtgatcgctgaatgggacggcaaagcaagagcgctttgcggcaacagcaacgaccggcggcggcaggcggcggccccgccgctgcagccgcggccttgcgcgagatgcaacgctggattgcacggatatgccattcatgctggcggcgatcgcgcctaaccttcctgcatccccgacgcatcgcgttgaacaaggagaagcgacatggaaaatcaagccactcttcactatgtgtacgatccctactgcggctggtgctacggcctggcgccgctgatttcggtagccgaagagaccgaaggactgaaggtcgtcgcgcatggtggcggcatgctggccggcgagcgcgcacagatgatgtccggggaatggcgcgagttcgtccggccccatgaagcgcgcattaccgcgctcagcggacagacgttcggcacgccgtaccaggagggcacccagttcaactatgacgtaaagctggattccgcgccgcccacggcagcgatgctggctgcggaatgggtggccgatgcgggtgtgcgcatgctgaaacggctccagaccgcgtactatgtcgagggccggcacattgccgagcgcgccgaactggtccacatcgccgtcgaactgggcctggacgcacacgcgttctcgacagcctatgaccaggccctgcgcgagatcggcatgcacttcaggaatacccaggcactgctcgacgcactgggcgggcagggctatccgaccctggcgatcgaacgggacggcatgctatcgcgcatccatctgggccggtatttcggcaagccggagcgtttccgcgaggcactggcggagctgatggcaccaccccagcccgtagcgtgaccgcacacgcatcagcagcgcgccgggcggtgcattcgcggcgaggaccggctgcctggcgtcagtcccggcggcgggtcggcccgggcagcgccgccaggaactccaggaatgcgccgattctgcgcgaaccgcgctggttcggaagatacagcgcggagatagcggagcttgcctggttcggattgacggaacagtcgtcgaacaaggccgtcagctgcccggcagcgatgtcgtcgtcgaccagccagtcgggcagcagtccgatccccccgccggccagcgcgacttcgcgcaggatctccgcgttgttgctgcggaagtggccgctgacgggtaccttggtctcgctgtcgccgtgccggaaggtccacacctgatcccgcgcgccatagctgaaccgaaggcagcggtgattgacgaggtcgaccggatcatcgggactggcattgctttgcaggtaggccgggctggcaacgacacggcggcgaaagcgcccgatttcccgcgcgacgacattgtcataggatgccgggctgcccagccgcacggaaaggtcgatgcgctggccccagcaagtcgacgatatcgtcggtcagcgtcacttcgacctcgagctggggatgctttgccagccacctacccagataaggcgcgatgcaccgccggccgaatgccaccggcaacgacacgcgcagttgcccgaccggctcctcgccccgatccgcgatcagcgcgtcggcctcctcgaccgcgtccaggatcctgcgggcccgctgatagtaggcggcgcccgcctccgtgacggtaatcagccgcgtggagcggttcagcagcaccgccccgagcgaagcctcgagcccgtccagcgcgcgcgtgaccgacgatgtggccaggttcaggcggcgccccgcggcagaaaagcccttcgcatccacggtctccacgaacatcccgtgtcgccggcgggcttggccgatgagatgactgctgcggagggtgtggtccgcttcagcatcatcccccgtgcgccattgagcggatcttcgtgccctcggcagagtttgacccggatgcttgcacattacgcggcacttcccgctcaatgcagtgcccggaaagccgcacgcacctcgacgctgaaaactccgcgttgcccacagggcaacgatctcgtgtaaagattgctgttcctcgaacgaatttttcagccaacaatccgcctcacaaccggttctcgtagatatgcgagaaggtctaagaaagtagaggacgacatgcaataccgaggactaccccccgtcaagcgctggatggcgctgagtgccgccatcctggggatgacactgaccagcgcaccaacgtccgccgccgacgcctttccctccaagccgatatcgatgctggtggcattccctccgggggggcccgccgatgttctggcgcgggccatgcagccggcgatggccaaggcgctcggccagcccgtggtcatcgagaatctgcccggcgccggcggtgcgctggcagtgcagcggctgctcagccgtccggccgacggctacacgctgatcatgggctcgcccaatgaggctatcctgacgccgctggcgctcgccagcgccaagtacaagtcggaggaactggccctgctggcgccggtctcgaaccacccgctcgtcgtgatgacgcgcagcgacctgccatacaattcgcttgaacagatcatcacggccagcaagtcggcaggtggcaagagcctgaccttcggcaatccgggctacggcaccatgtaccacatcgtcgccgaatacatggctcagctgaccggcgccaagatgctgcaggtgccgtacaagggcgccacgccgatgctggcagacctgaccggtcgccagattgacatgacgattctgccaaacctcggtgcctccacgcagttgctcgaaacgcacaagatcaaggcggtcgcagtgctggacacacagcgcatgcgaaacctgcccgatgtgcctgcgatctccgaaaccagcgtcgcgcgcaaatccgagttcgtgtattcgatctggctgggcgtcatgagcaaggccggcgtcccggcggagcgtgcccgcgtattgatggatgcctcgcagcaagcgctgcggtcgcccgaactgatcaaggcgcttgatctctccggcgtgcagccgatgaagccacaaacgctcgaggcctccgcgaagttctacgtcgacgagaccgagaaattcaggaagatggccgcctcgatcaagctgacgccgcagtaatacccccctcccggcattgggggcgcccacgctcgtgtcgctggccccgcctcgttccagcatcccattccaggaaggttctccttgaatatcctagttgccggtttccagcacgaaaccaatacgttcgcgccaaccatggccacctacgagagcttcgtccgtggcgaggacttccccgccatggtgcgcggcgaggcgatctacgacctgctggacgtgaatgtgccgatcagcggcttcatccaccacgttcgcgagcacggccacaccgtcacgccggtgatctgggcagcagccggtgcttcggcccatgtcacgaccgatgcctacgagcgcatcgccggcgagatcgtggaggcggtggcgacggcctcgtacgacacgatctatctcgacctgcatggcgccatggtggcccagcacctcgacgacggcgagggcgagttgctggcgcgcatccgtgccgcgaccgggccggacatgaagatcgtggtctcgctggatctgcatgccaacgtcaccgaacggatgctcgcgctggcggacggggtggtggcgtatcgcacctatccgcacgtggacatggccgccaccggcaagcgggcagccgagatgctgcttgaattgcgcaggcgggagacgcgtgcgcacctggtggcaaaacgcgtgccgttcctgataccggtcaacagcatgtctacgatgatgcagcccgctcaaggcatctacggcctgctcgaagagctggagcaacaaggcgtgctgtcgctgtcgttcacaccgggctttcccgcggccgacttcgccgagtgcggccccgtcgtttgggggtatggctttgataaggccagcgtcgagcgggccgtcgaggcactgctcgcgcgcatctgtgaacccgagagccagtgggccgtgcagttcgaggagcctgatgcagcggtgcaacgtgccatgcggatcgcgcaaacagccacccggccagtgatccttgcggacacgcaggacaacccgggcgtcggcggcgatggcaacaccatgggcatgctgcgtgcgcttctcaaggccggcgcgcaggacgccgcgatcgggatcatctgcgatccagcggcggccgcggccgcgcaccaggctggagttggcgcgaggatcgatatcgcgcttggcggctgcccacaggtgagcgaggatgccccgctgcgggcgaccttcgaggtggaggcactgtccgatggcaagttcgtctacggcggaccgatgatgcatggcaaggctgccgacatgggaccaatggcgcggctgcggctcgacggcgtactcattgccgtcagctcgaccaaggcacaactgctcgaccgcaacatgtaccgcgcggtcggcatcgaaccggcggaaatgaagattctcgtgaacaagagctcggtgcatttccgcgccgacttcgccccgatcgcggaagacattttcgtggtgcgtgcgcccggtccgttcatcgccgatccggcggacctgccatggcagcatctcacgtccggcatgcgcctgaaaccgaatggtccggcgttcgcgccggtgccgcgaatctacgacaagcttacgcagctcggcatcgaactgcccaaggcttcgggcccggcggcggcctatgtgccgagcgtgcggtccggcaagctgatccacgtgtccggccatctctcgcgcgtcgatggccaggttcggaccggccgctttggcgaggacctgcgcaccgccgacggtgtcgcggcggcccgcctggttgccatcgacttgctcgcgacgctgcacgccgccaccggagacctcgattcgatcgtgcgaatcgtcaagctcaccagcctcgtccagtcgacagcggacttcaccgagcagcacttcgtgactaatggtgccagcgctctgttcgccgaggtgtttggcacgcgcggccagcacgcgcgcagcgcgttcggcgtatcgcagttgcccctcggcgcctgcctggaaatcgaactgatcgtcgaggtcgcctgattccgtgcacggcctgaatggcgccagcaacgcatgttcatcggcacgactgccaggtcgccggaagcaaaatcgcaaccgtctgcacgatgccatggcacgtccggatgatgcttctgcatccaccagtcgaacacatagtggaggaacacgttagccagtaatgccacatgcgtaggaagcatacggaattttgggcgggacggcgctagcagaaggctagtcgcaccctactagccgcacggcggcgattgtggcggacatcgtcagacgcctgcctgacgatgtctcagttcagctaggtcaccaatgcccatgcggtcaagcgcctccagcgggcaaaagaaggtgacacggatggtcccggaagccggctgatatcgatcgatccgggatggtggcgcggttgggcacctcgtcgtagaggaggccggtcccatcggcggcgcgttgcaggcaattcctagctgcagcggtgaggtcgactccgctgcagagacgatggagacgccacaaccacaaaatgcgcgtccctcatctagctcgctcactaagttcgctcccgctgcgccggccgtaccggagacaagaactgatgtatctgggcgaccacggccgcaccttcgccgaccgccgatgcgactctctttgtagatcccgagcgaacgtcaccgatcgcaaagacgccatctacactagtctgtagtggcagcagcgatgcttccgaaacatcggcgccagtcaacacgaagccgtttccatcgagcaccacgccgcatctcctgagccagtctgtattcggcagtgcgccgatgaacacaaacagatgatgtgtggtcatgcttccttctatgccacctgcgccgcgatagtgcacgcgctcaagccgcacaccgccctcgagcgcagtcagttcggttcccgtgtggagtgtcaaattttcaagtgagccgatacgttcgatcaggtagcgcgacatgctatcggcaagcctcgatccgcgaatgaacatgtgcacgtgctcagcatgcgatgcaagaaacaccgccgcctggcccgccgagttacctccaccgagcagcaacaccggctcgttgcggcatagtcgagcttcgatcggcgtggcccaatagtagacgccacagcgctcgaagcgctcgagtccgtcgacaacaggccggcgatactcagcgccgctggcaatgacaacggtccgtgcggagatacgacggtggtcggcaagctcgacggcaagcgggtggcggtcgcaatacaaggccttcacctcgcacggaatgccaatatgggcaccgaacttctgtgcttggatgaacgcgcggctcgcgagatcctgccctgtgatgccagtggggaaccccaaatagttctcaatgcgggcactcgtacctgcctgccccccaggtgcacgacagtcgaataccgcggcggacaagccatcggatgatgcgtaaacggctgccgcaagcccccctgggccagcaccgataatcgccacatcgtacacgtgagccggattgaagtccgggatcagtcccaggcaggatgcgagctgccccacgtccgggtttcgcaagacggtgccatcgggacaaacaaccagcggaaagtcatcgggctgcggcgtcaggcgctgaagcaaagcgatcgcttcggcgtcctcctccgcgtcaagtgtcagattcggaaatgcgttgcgacgcaggaaattttgcaactcaaggagcctcgcgtttccgggggcagcgacgaagacgactccacgcccgcgttcaatggccaggacacgcctcaggatcagcgcgcgcatgatcttgtcgccaggaccagcctcgttgacaatcatggcgctgagctcgtctggacgcagtagcaccgcttcgacatcctcaatcacatgtgcgtcaacgactgcaggtttacttgagagctgcgtgatatctgacgtgaactcaccgcgcattgtataggtgtgaagaattcgctgttgcgacagaccatcgcgaatcactatccgcaccttccccgacaaaatgatgaacacacccgggcatatgcttccagcgcgataaagaaaatcgcctttgacgtaatggcaggggttcccaaagcgacacactctggcgacctcctcatccgtgaggacgggaaacatttgctggtaacgcggatgctcgcgtacgcttgcgtcttcttcgatagcgctgctttcgcacgtacttgctgccggccggctgacccccctagctcccagagctgagtccttgctcatggcgattctcctaccataacttcgccgcgccatcaaagcatcaaagcgtgaggacggcctctagaacttgtcgacgtcgaccaccgcctgagcgaattctcgcggtgcttcctgcggcaagttatggccgatacctcccttaacgtcccgatgcgcgtatttgccggtgaatttgcttgcataggaactgggtgccggatgtggggcgccgttggcatcgctttccatggtgattgtgcgcacgcctatggtgggcgccgacgcgagccgctgctcaaactcatcgtacttcggctcaccctcggcaaggccctgccgccagcgatagttgtgaacggtaatgtcgaggtgatcgggattcttgaaagcagcggcgctgcggtcgaaggtggcgtcgtcgaatctccattttggcgaagcttgccgccagatcagtttggtaaagtcgtgcgtgtatttctgatagccagcgcggccgcggtccgttgccaaatagaactggtaccaccaccgaaactccgcctcaggcgacaacggcatttttccggccgcctgactgccaatcaggtagccactgacggaaaccaggccgttgcaacgctccggccacagtgcagcgatgatgcaggccgtgcgtgcgccccaatcgaacgccccgaggatgggtttttggatgttgagcgcatccatcagtgcgatgatgtccagggcgacggccgccggttgtccgttgcgcatcgtgtcgccagacaagaaggtcgtcgagccatagccgcgtagatacggaacgatcacacgatacccgcgcgacgccagcagaggcgcgacgtcgacgaagctatggatatcgtagggccagccatgcaacaggaggaccgccggcccgtcggcaggacccgcctccgcgtaaccgacgttgagcaacccggcattgatctgcttgatcggcgcgaaggctgtatgggtgccgggcctgctcgaaggcaatggggccggctttgactgctgggcttgggcggaagtgaacatcccgagctgtgcagcagcgactgtcagggcggccgtgccaagcatgcctcggcgtggcaaatcgattctctccgtcatcgtactctcccgtcgcgcgagcaagcctgagcggaatcgcttattaggtcggcgctgaatttcgtcggaagcgtgacccagttgccggaaccgataccggaaccggcacaacgacgtttgtggcctgatttatgagaccaatataggtcatgccaaaacgggaacggggcagtgcaatgagggtctcttgaggagatcctggccggttgccccaaggatcaagcagcgatactcagggcgccgctccgttaaacaacggcaaatcttggcgagcgtttggcgcgaaatgccgatcgacaggcagtgctcctgtggaatcaggaacgcgccgcttgccaacgtgccagcgccgtgcgcagcagagaagcggacgctgccaacagcacgaggtccttcagcaggaactgaccgatcggcgcggagatcgccgggaacccaccagcagtcggctctgcaacaccaggggtggtgacaaagaacgtcagcgtgatggcgtaagtcgcgcatgacatggctgcaccgagtaccgacaccccacgatggaatgcaccgacggtcagtgtcaccgcggtggacagttccagcacgccaatgacagcgctggcgccacgaacaccgaatgcgtcgatgagccaggccatgaaggggctattctcgatgaacggcgcaataccgtgggcttcgtagccggtaaacttcatcccgccgaaccagagaaagacgacaaccagggaccagcgcagcaacgcctcgtggttgttgatggcctcgctggtgcgcgttatagcgaaggatgtgatgggttgcatacttactcctcaacggatgtgtggtgtggtggaggagcacgccccggtggcgcagactcctttcctgtcattgcgacgacgcgcatgcgcgcgttccggcgcggccggctccagctgtgccagaaccggcgaatcgaataaatctttgttccagagacgtatcaggcgcgtccattaccgtaatgaaatcgccccacggacttcggggctcccgtcacgcggtaaggtgcgttggacggctttcagtcgcggaacaagtgcgtggcatgcgttacggcaccgcccgcccggattgcggcggccacgagcgcggcctccgcgagttgggcattggtggcgccggcatcgtgggcggccttggtatgcagggcaatgcaatatgggcactgcgtcgtcagcgccactgccaccgcaataatctgtttctgctgcaccgaaagcgcgccgtctgcaaaagctgcctgatcaaaggcacggaagctcttcatcgcttcaggagcgttttcgtccagcttcctcaaacgggcaagatccttcatatcgaacatggaaaactccatcaaggttgggttggagtaggtatgataggaatggcaaggttccacttggtcttagtttggtttcaattcgtccaatgatggcatccgccccttctgcacatcgtgtgctcgagcatttccttgccacactcgacattggtgtcacgcacatcacacggtgcgacattcgcgatgggtggagcgtgcgcttcgatgcgtgcgaaacggccagcctgcactactgcctggacggctgcggaacgctcgacgcaggcaatggccaccgcatcgcgttgcagccgcacagttttgtcctgatgccgccaggcgtttcctatcggctggaaagcgcgttcgagtcgccgactatgtcggtggatcgggcaaggcttggctcatggtccgcgcgcgaaacggcgccgacggtgaaggtgggcgaggcggcagcgggagttgagatggcgtgtggggagctgcgctttgcgacgagtaccgccgatcccttcaggatgctgcggcatccaatcgtgacgcggttcgacgggccggctggactgaaagaccagttcgtcatgctgttggcggaatccgcgcagcccggactgggatcgcgggtgctgatcgaggcattgctgaagcaatgcctggtcatgctgctgcggcgtcagatggagagcgatgacgcggagctgtcgtggacggcggccgttgccgatcccaggctgcttctcgcgttggaaaaactctttgaacatcccgaagtgccactttccgtgcagcgattggccgatctggctggaatgagccgttcagcgttcgctgcgcacttcgaacgtgcgttcggccagacgccgatggccatgctgcgagcggtgcggctgcacaaggccgcggaattgctggcgactacaaccttgcagatttcccaggtggcgcacgccgttggtttctccagccgcagcaatttctcgcaggcgttccacaaacagcatggtgtggacccaagcggatttcggcagcggacgacatctcgtcagcgtgtgggtggcaactgattccgaatgcggattcaactgatcgcggcgtgccgcgcaagtaccgtcgcaggctgtgccagggactactctgtacttacgcatgaaccgacactgcctcgtgcgtcgactaaacccttctcaaaaatggaaggaaaaaaatcatgcgcttccccctgagacatgtgtcagtcgcctcggccgtcatggcactctgtatgacggctttggcacaaagcgcaccggatcccatccgccctccggcaatccttccactcgaatcggaacaggcaccaaagctggtctcgtatccgccgctggccgaaccgttggcccgcggtgtcgtcatcgtgcagttccggacccaacacttccgtgtcatgcctgtgttcggcaagaccgccgtccagatatcgccgcgcattgggcatcttcatgtaactgtcgacgactcgcacattacctgggcacacaccagcgaggatcccgtcatcgtagtggggctgccgccgggcgcacacaagcttcggctcgaactggccgatcccagtcacaagatcctggccacggagagcgtcgcctttaccttgcctgatccgaaggcgccggcggcgcacaagcattgatcgcttgaagttccggcgggcttttcgtggttttgatgcgtcgctgcatgtccgccggttcagtggataaggcgatcgatctgttcttgccggccagcagcatgacgggagcaataagcacgaagccgatgccccaggagcgcagccacaggacgacaaactcttcattgaacccgagattgagaggcaattgagacagttcggttgcgcctcggaaaatgctgggagacttaaatcgggtactgtggcgctccgccctgaatggtcatccattgccactgggaaattcctcccagttggccgctccgccaatgctggtgccattgccagacgcgccgacgccgccgaccgggttgatgacctcgtcgttgacggtctggtcgttgatatgcagcatgccggtacgcaggcgttccccaatgcgcaatgcccgaccgacattgctggaaacaatgcccatcgacagcccgtactcggtacggttggccagcgcaatcgcttcttcatccgtgtcgacggcaccaccacggccaccggcccgaatatctcttcgctgaaggccgggctatccggtgtcacgtcgcaacgatcctggcaacattgtcgcgctggccttcattgatcaacggcccgagcgcgacgtcaccttcaacgggatccccgaccgtcaggctcgcggccttggcggccagcttctcgacgaaccggtcgtgaatggcacgctgtaccagcacacggtcggtggccatgcagatctggccctggtgcaggaagctaccccaggcggtgtttgcaaccgcgagatcgagatcggcatcatcgaggataatcagcgaattcttgccgcccagctccagcgaaaccttcttcaggtgccggcccgcggcctccccgaccttgcggccagcagccgtggagccagtgaactgaatcatcgccacatttggatcggccgtcagcgcagcaccggcggcaccatcgcccggcagcacgtgcagcgcgcaagccggcaggccggcgagttcaaacagccgcgcgaccacgaagccaccgcataccgccgtgcggtgatcgggcttgagcaccaccgcgttgcccagcgccagcgccagcgcagcggcccgcatcgccaggtagagcgggaaattgaacggcgagatcacgccgactacgccaagcgggcgccggcgtgccagcgacagccgcccgggcacggaaggcaatacctccccggcggagcgcgatggcagccctgcggcttcctgcaggaccttgatggtgatcgtggtctcgaacgccgccttcgctcgcgtggagccgccttcgcgcacgatccagccgacgatctcatcgaaatgcgtctcggcaactcgcacagccctgcgcagcacacctgctcgttcttcatagtgcaggttggcccagcccggcaatgccttcgccgcggcctcggccgaactggcaatcatcgaagcatcggccatgccgatacgccccagttcccggccagtagcgggctcgatcacgccggtcgcgaagctgccggcctgccagcgcccggtaaagagctggtcagtccagatgctcttgtcgagcaagccgggggaatgcgtgagattcatgaaaaccccattcctgcggtgttgtggtgtgccgaatgacgcgcaggaacactccttcccgcgcgcagtcgcgcacgatcctcaccgcatgacggtggtccgagcaactaaagccggcgattcacaagatcgcctccacgcttcgatccccatgaaatgcgcgggagaatcgagcgcggacctcaaacgctcttgcgtgagcccgcgcgcgtaggcgcagccctttcgccccgccggttggccgcacgatccgacagccagttgacaacctgcaccccgtagctggccggcgtcttgtcattgacgcgctgagaaaggtcggccagggtatgccgtttcagttccgctcgcatagccttctctgcagcctgcatgacagcctgaatcgagcagacgccacgcgtcgcccaacccggtgcgtcatcattgaagacggcacagcgcccgcggatctcgaggcagtcgaacagcggcttctcgccatcgatcgcgaccacgacatcgtgaacggtaatgtggttggcgggccgcgcaagccggaatccgcccttgatgccctcagtggcaactaccagcttagccttggccaacttggtgaacagcttggccaggaaatcgtgtggaacgccctgaagctcagccagatcacggacactcgcttcttccacggccgactgcgaatgcgtcaggtacagcaggcagtggaggctgtattcaacgcctgtactgatttgggacatggcatactaggactttgtgtatcgtagttgcaatgctatacaacttccgtggggtccgcaaggcaaaggacatgccgttggcagtcacggcaaccggaccgataaccggcttccggtcgcccggcgcccggtgcctggctggtgtgagcgacaagcctcctgatacgcactgaaacacacccggcagcaggcacgccgtcaggatggtttccgctgcccccatccgccgccgaggctgcgcaccagcgacaccgtcgccgcggcacgcaagcctgccaccgcattggcatcgcgctgcgactgcagcacggtgcgatcggcgtcgatcacggtcaggtagtcgacggcaccggcatcgtagcggctgcgcgagatgccctgggcccgtttcgcgccggccagggcgccgtcgagcgccgtggcctgctggctgagccagcgcacatcggccaggccgtcctccacctcacggaatgccgacagcactgtctgccggtagcgcgccacgctctcctcgtgcgcggcgcgggcgccagcaaggcttgatcggttgcggccaccgtcgaacacggtctgcgccaccgtcgaaccgaccagcggacccagcagccatgtgcgcgacgaccacttgaacaggttcgacaggtccgacgactcgaagccgaacagcgccgtgagcgagatgcgcgggaaaaacaccgcgcgggcgatgccgatgcgcgcattggccgccgccatctggcgttccgccgccgcaatatcgggccggcgctcgagcagttccgacggcagccccgccggcacggccaccggagcggtatcgaacggccgggcggcgagtccgaactgcgcgggcgccacgccggtcagtacggccagtgcatgttcctggttggcgcggcggcgctcgatgctggccaggccggagcgcgccgcgcctagttcgctttcggcgcgggccggatccaggtcggtggcctcccctgcttcgtaccgcgtgcgcagcagcgacagcgcgccctcacgcagcctgatcgtcgcattgagcagctcgcggtcactgtccagggtgcgcagcgcgaagtaggcctgcgccacgtcggcctgcagcgccagctgcacggaccggtacagttcctcggcaccccgctcgtcggcgcgcgcggcgtccacgctgctggccacgcggccgaataggtcgagttcgtagctggcgaatgcgcgggccttgagcaccgtctggggcgccacgcgcgcgccatcgggcagcccctgcgaggcggccgacggctgcgagcgagtcgggtccaggcccacgctcagttgcggataccgcgccgcctcggtggcgccggtgaacgcacgcgcctgcttcaggcgcgccgccgccgcggccagctcctggttgtgaacgttggctgcatcgatcagccggtccagatcggcatcaccaaacagcttccaccactcaccgcgctgctggccttcgtccggcgtggcggtcttccattgcgcgctctcggccgcggcggcctcggcttccttgaacgtggaggcactgggtgtctccggcaccttgtaggtcggcgccagcgagcagccggccaggagcagcgcggccgccatggccgcaagccttggcacgttccgcttcgtcgcatcgctaatgttatgcatgtctttcaccattactctgcggacgccacggcgtgcgcgacctttgcatccgtcgacaccgccgcgcggcgctggccgcgcgtggccagcaggcgcaacgccacatagaacaccggcgtcaggaacagtccgaagaaggtcacgccgagcatccccgcgaacaccgccacccccatggcctggcgcatttccgcgccggcgccgctcgacaccaccaacggcaccacgcccatgatgaaggcgaacgaggtcatcaggatcggacgcaagcgcaggcggctggcctcgatcgcggcctcgaccacggtgcggccgtgatgctccagctcgcgcgcgaactcgacgatcaggatcgcgttcttggccgatagccccaccagcacgatgaagccgatctgcgtgaagatgttgttgtccccttgcgtcagccatacgcccgtcatggcagccagcaggctcgtcggcacgatcaggatcacggccagcggcagcgtcaggctctcatactgggcagccagcaccaggaacaccagcagcacgcacagcgggaagatccacacacccgcgttgccggccaggatgtcctggtaggtcagctcggtccattcgaagccgatgcccttcggcagggtttcggcagcgatgcgctcggcggcagcctgcgcctggcccgacgagaagcccagcgccgggccgccattcaggtcggcggcagtgaagccgttgtagcggatcacgctgtccgggccaaagccttgcttgacctgcaccagcgacgacagcggcaccatctcgccgctggcgctgcgcgccttcagctgcaggatatcctcggcatgctggcggtactgcgcatctgcctgcaccttgacctggtaggtacggccaaacttgttgaagtcgttgacgtaggccgaacccaggtaggtctgcagcgtatcgaacacatcggtcaccggcacgccgagctgcttggccttggtacggtcgagctgcacatcaagctgcggcacgttcacctggtagttgctgaagatgccggcaagctcaggcgtggcgcgcgccttggtcatgaacgagttggtggcgtcgaacagggcgtcatagcccagtgcggcgcggtcctcgatcatcagcttgaaaccgccgatcgtgcccaggtcctgcaccggcggcggcgggaacacggcaatgaacgcgtcctggatcgcgccatactccttgttcaggtccgcggcaatggccttgcccaacagctccttgctcttgcgcttctcgaacgggtcaagcgtgacaaagacgatgccggcgctcgggctgttggtgaagccgttgatcgacaggcccgggtaggcaacggccgattccacgcccggatgcttgagcgcgatctccgacatgcggcgcgtcacgtcctcggtgcgatccaacgtagcgccgtcgggcagcttggcaaagctcaccaggtactgcttgtcctgcgccggcacgaagcccttcggcacgagctggaacacgccccaggcggccaccagcatcacggcgtagacgccaaataccgagcccttgcggcggatcacacccttcacgccacggccatagctttcggagctgcggccgaagaagcggttgaagcggacgaagaacttgccgaggaccttgtccatgccacgcgtcagccagtccttgggcgcgtcatggctcttgagcagcagggccgacagcgcgggagacagcgtcagcgagttgaaggccgagatgatggtcgagatcgagatggtcagcgcgaactgcttgtagaactggccggtcaggcccgtcatgaaggccagcggcacgaacacagcgatcagcgtcagcgcgatggcgatgatggggccgctgacttcgcgcatggccttgtaggtggcctccttcggcgtcagcccctcttcgatgttccgctcgacgttctcgaccaccacgatggcatcgtcgaccacgataccgatggccagcaccagcccaaatagcgacagcgcattgatcgagaagccgaacgcatgcatcagcccgaaggtaccgacaatcgacaccggcaccgccagcagcgggatgatcgacgcgcgccacgtctgcaggaacaggatcaccaccagcaccaccagcacgatcgcctcgaacagcgtgtggaccaccgcctcgatgctgtggcgcacgaactgcgtggggtcatagacgatgctgtaggccacgccttccggcatgttctgcttcagctcggccatggtcttgcgcacctcgttcgagatctcgatcgcgttcgcccccggtgactggaagatcagcagtgacagggcggacttgttgtccagctgcgaacgcagcgcgtattccgaagcacccagttcgatgcgcgcaatgtccttcaggtacgtgaccacaccgtcaggcgaggtcttggcgatgatgtcgccgaactcttccacggtctgcagccggccctgcgcgttcaccgacagctgcaggtcggtgcccggcagcgtcggcgactggccgagcacgcctgccgccacctgcacgttctgctcgcggatggcgcgcaccacgtccgacgcggcgagcccgcgctcggcgatcttctccggattcagccacactcgcatcgagtagtcacccgcgccgaacaaccgcacctggccgacgccctggatccgcgcgatgcggtccttcacgttgatcagcgcgtagttgcgcagataggtcgtgtcatagcggtcgttgggcgagaccaggtgcaccaccatggtcaggtcgggcgaactcttgaccgtggtgatgcccaggcggcgcacatcttccggcaggcgcggctcggcctgcgagacacggttctgcacgagctgctgggccttgtccggatcggtgcccagcttgaaggtcaccgtcagcgtcagcgtgccgtcggtattcgcctgcgagttcatgtagagcatgtcctcgacgccgttgatctgctcttccagcggcgtggccacggtttcggcgatcaccttagggttggcgcccgggaactgcgcgcgcaccaccactgacggcggcaccacttccgggtactccgagaccggcaaattgaacatcgagatggcgccgatcaggaagatcagcaccgacagcacgcccgcgaagatcgggcggtcgacaaaaaatttcgagaaattcatcttggtctcggcgaaagcagtccccgctggcggtccgccggagcggacgccagtgcaatctcaggggagaattccagttcggtctgtggcggagggtgggactcagctcatcctggcctttccggccttcgcgtcagctgcggcctgcttgcgatccgtcgtgctgccacgcgactccagttcgctgcggtaggccatcgctaccggcttcggggtcacggtgtcgccggggcgcacgcgcgtcaggccattcacgacgatgttctcgcccggtcgcagacccttgcggatcacacgcagcccttcgtacgtcggccccagttcgacttcgcggtacgcgagcttgttggccttttccaccaggagcacgaacttcttgccctggtcggtgcctatggcgcgatcgttgaccagcgcggcgggatatggcgagccgccgccgagcttgaccttcgcgtacaggcccggcagcaggcggcggtcctcattgtcgaagacggcgcgcacgcggatcgtaccgctgcgcgtgtcgagccggttgtcgatcgaatgaatccggcccttgtgcggattgccatcctcgttggccaggcccaggaataccggcaggtctcccttgccgccaccagcgcccggcgtcgtgtagcgcaggtagctctgctcgtcgacatcgaagctcgcgtacaccggcgagaccgataccaccgtggtcagcggcggcgatgccgcgccggccgccacaaggtttcccaccgtgatctcggcacgcgacacccggcccgtgaccggtgcaacgacgcgcgtgtagcccaggttcagcttcgccacctccagcgccgcctgcgcaccacggacgtcggccgacgtctcgctggccgcgttgatgcgctcatcgaactcgcggcgcgagatcgcgttatcgtcgagcaggcgttgcgcgcgcgccttctcggtctgtgcatgcgatgcacgtacctgcgccgctgccagtaccgcctcggcgcgcgccacttcggccgcatacgagcgcggatcgatcgtgaacagcgggtcgcccttcgtcacgatcgagccatcgcggaaatgcaccgtttcgatcgcgccggacacacgtggacggatctcaacacgatccacagcctcgatgcggcccgagaattcatcccattcggtgatgatggtctggcccaccactgccgccacttccaccgccggggtcggcggcggcatggtcgcctgtgcttccccgccgtgccagggacgcagtaccgaggctgccacgccggcccccaggattgccacgaaggcaatggcgagcagtgtgtgtcgagacttgcgattcatctttcttcactccatacatctttgagattccagagtcgagtcttacccccgtgcagcgcatcttggcatatcggcgacccataactacgattatattagtcgtagttatgggtcgcaagatatttcttgatcgagcaacgttgtccacctgcatgtgcagcggtgagatcgtgtcgcgggcgttgtatgaagttgagccgacaacctccgcgtcgtctttctgcggccgaccggggccggtgcgcgcgtccagcccatcacgccggatctggcgaagcggcttcggaggttgcgcggatgcttacgcgttgcgtagcgaccggaacccggagcgcaattcggcactgaatagctctggctcctcccaggcggcaaagtgaccgcccttctcgacgcggcgatagtagatcaggttttgataggctcgctccaaccactgttttggcggccggtagacctcgccagggaaaaccgtcactgccaccggaacggtgatgggagaattcattgccggggcgctactggcttcccagtagatccgtccgctcgactcgcctgtatttgtgagccaagagagcgagatgttgtcaaggatcgcattacggccgagtgctcgctccggatcgccacgcgtgaatacccagtcggcctgcttgtcatagatccacgctgtcagccccactggcgaatcggccaggccaaaggcaatggtttgcggccgcgtttgcatgatggccgcgtaaccgaatccccggttgagaaaatccctcgcgtcgtcgaacacttgcctttcttcaggggtcaggattgacggcgcagggtccccgcttttcagcgccatggctatcgccggtggcaacgtggtggcgcgctcgatgcggttgacgtggatgccaagcagcccttcaggcgccagactgccaagagcgtcggagatgattgcgccccagtcgcctccctgcgaaacgtagcgcgcatatccgagccgcttcatcagcacgtcccacgcgcgggcgatgcggcccgggtgccagccagtgtccgtgggcttctgtgagaagccgaagccgggaaccgacggaatcacgagatgaaacgcatcgtccgcgctgccgccatgcgctgtcgggtccgtcagcgacggcgccgcgcttcgatcccgcgcaggctcggcggacctttacgctggccctgtctgatgttggagaagcggcattcctgccgcgcctgctggcccggctcatgaaagaggcgccgcatgtggacgtgcgtacggtgtcggcacggcacacggacatcatggatcagctcgaacgcggcaggatcgacctggccattggctactatccggatctgggcggttcggacgtattccagcagcgcctgttccggcatggcttcgtgtgcctggcgcgcaagaatcacccagtcgcacgcggacgcatgacggcgcaacagttccgggaaccgcctcatgcgatgatccagaacgaaagccgcagccaggagctggtcgaggcgtatctgcgccagcacggtatcgcacgccgcgagatgctgcgttctccgcatttcctcagcattccgctcgtgatcgcatcgtcggatctggtcgtcacggtgccgctgccggtcggcgagctgttcgcgcgcatcgcggatgtacaggtccttgagccaccgttcccgatccccgctttcgatctcaggcagcattggcaccgttgccagcatgacgacccgggcaatcgctggctgcgggcgatcacccaggaactgttcggcgaatctcctggcgagtagtggcccgtgcatcgcatgtggttgaagcaacgagggcgatccatcaggatcgccctcgttcatgattgctagcgctgtcaggccactaccacatagtgcggatcggcccaagccagcgcctcggcacggtcagcacttggcggatagatccactcggtgttgatctgcgtcttcagtgccttggcttctgcgcccaccagcttcacctgacgatcccagccttcggtgtatacagccccccacgacccgagatccaagcaggtgacatatttcggctggctgtaaggaatcggcgttgcccccaggaggtccgccgccacattatgtcctgcaatccggcccagcttcatcgcgtgctgacaggacatcgcggcgtggttgccttcctcatcggtggacgcgtaggcaacgtcaccagtagcgtagaccgtatcgatgcctttgaccttcaggttgcgatcgacatggagccgcccgaagttgtcgcgctgcgcaggaatctgcgacgtcagcgcactggcgcgcgcgccggcggtccagattaccgtgtctgtctcgatgcgctgaccgttctcgagcgtaacgccgttcgcatcgaccgccgcgacgccggagccgagcttccatgtcacaccgagctcagtcagcgcctcggtaatcaccggacgcgggccgggacccagatccgggccaacgtcgctgttgcgctcaaccataatcacgttcacggcagcgtccttgccgaacacctcgcgtagacgggcaggcatttccgctgcggtctcgataccggtgaagccggcaccggcgatcactaccgtgttgcgcgctacgctttcgggacgacgcgccaggctggcgagatgcgcatcaagcgctgcggcatcagccacctggtctacattgaacgaatgctgctcgagacccggaatctgcggccggaacaggcggctaccagcggcaaggaccaggcggtcatagccgagcttacggcgcgacgtatcgccacccagccccacaagttccactttctggcttaccacatcaatgcgttcgaccaggccctggatgaacctgacgcccacagcctgaaagatttcctgcagcggcgccctcatgccgcctgggttcttctcataaagacgcggacgcacgtgcagctcgggctccggcgcgaccagtacgatctccacgtcagtgcgccccacttcatccagaaggcgggccgaacccagcgcgctccacatgccggcgaagccggcaccaataacaacaatacgtttcgacatgcttcatgctcctgaatcaatgctcggtttcgcgtgaccggcgaactccacagttggcgtatcagcctgatcagccaggcggcgcccaccgtaactacgattgtaatagtcgtagttacggtgggcaagatttttccgcgacgccaaggtcgcgacattctcttgtgccatctcgtgcgcttttcacctgcgccttgcacttcaatcatgtatcgactatctttactacgactattgtaatcgtagtatattgagctggtgcttttcctgcgtgtgacattgctggagctgacggacgcgatgctctaccaaaccgggcggcgcgtctccgaccccggcaggcctacagcaggccacgacgaagcaagcgcgcttggcgatcgaataccggcagcaaatgatcaagatcaaggctctggttgacgatacccgccgcacggccgaagaacggttggaggacatcgccaagctgctcgagggcctaggacgactacccctcatcgctgtccacgacaaacacggccagcagcttggcgggctttgacttgctcgcgttgcggctaactgcatggtgcgatcccggctcctcatggaagctctcgcccgccttgcagatgcgttccggcccattgtcgaccttgctcgcaaggctgccagagacgacataggcatgccggttccctcaggcacccgggtgcatccagccggttctcgttacagagattctgtccctggtgggccggcgcttaactgcgattcatgtagtctcagtaacaattgtggattgatcgctgaagtgcaagccactcgtgcaggtcagctggtagcagttggtaaaaaaaaacttgcatcgcttaactacgactactatgatcgcagttaagcgatgcgaacgagcgctcgctgtttcgatcgggcgcgctacgccgcggcggagtcggcctgttacttgagatttggttcaggagtatgaaagatgtccaaacggattcttgtcattggcgccggctttgccggcatgtggagcgcgctggcttcggcccgtttgcttgaccaggttgggcgcaccgatgtggagatcgcccttgtcgcaccgaagccggaactgcacatccgccctcgcctctacgagcagaatccgaacgggatgaaggcgccgttgcaggacatcttccaggccgttggcgtcaggttcatccagggcaaggtggagcacatcgatgtcgcaaaccagacggtgagcgttgcgggcgttggcgctgatacgccgcgccagcgcatcagctatgaccgtctggtgcttgctgcaggaagccgcctgttccggccgcagatcccagggctggaccagcatgccttcaatgtcgaccaggtcgctgacgccgcggagcttgaagcccatatccatggactggccgaccgccgggagagcgccggccgcaatacggtggtaatcgcgggtgccggctttaccggtatcgagacggctgccgaaatgccggctcgcctccgcgaagtcctgggcgaggacgctgccgtgagcgtgatcatggtcgagcgaaatgccgcgatcggccctgacctgggcgagggtccgcggccggtcatcacgcaggcgctggccgagcttggggtgacatggaagctcggctcgggtgtcgcggctgtcgatgcgaaaggcgtcatgctcgagaatggggagcgcatcgaggcagacaccgtgatctggacggcgggcgcccgggccaacgaactcaccgcacagattccggcagagcgggacaactttggccggctgcatgttgaccgcaacctgaaggtcaagggggtcgaggcggtgttcgccaccggcgactgcgcctatgccgcgaccgatgacgaaggcaacttcgccaccatgtcttgccagcacgccatgaatctgggccgctcggccggccacaacgtggcagcagacctggtgggcgcggcgccaatcccttacagccagccgaagtacgtgacctgcctggacctggggccctggggcgctgtctacacggaaggctggaaccgccaggtgaagatgacgggcggcgtcgccaaggcgctgaagacgcggatcaataccgagtggatctatcctccgagcgcgaatcgtgaagaagcgcttgccttggctgacccacggttcatcgtcgtggcctgagggcgcgaggcaaaaaggcaagggggcgatccgcgggatcgccctctctgcctttgtacgcccagcatgggcgcactctcgtgggtgtaagtcccaccgtaagttgatcacagcggacgaagcgaagcgcaactgcgaaagggtgaccgatcgtggggaggagcgcgagcgaagctgcgagccgaggaacacgaaccggatagaaggcggtgccgaccagaacgagcgggcaaagcttcgcgaagttctcgcgatcaaggggaggcggcgtatatccggcggttgtgcagtgaaggagtacgttcttacctggggagatctcgcctcatgcctgaacgggcaacggcgtcgagccggagcgagaagtcggcagaggtcgaagtagtcggaggggtagggctcaagaccgccgatgaaggaccgagcgaaagggagtgttcgaagccgtgtcgatgcagcaggcatcgcgtcagaagcccgcgcgagcggggcgagcgaaggaaacggacggtgaaaccggccgggaactcgcttgcgacgaagcctgcggcctgcgacgcgaaccagagagcacagggtcggcgccgcttgcagcggcgctgacgcgagataacctgggtagtatccagggtgatccaccatggccccgcccgtcgagcttacgagcgtggaccacctggcgctcaatccagtaatacacgacgtgtggactgatgcccagtcggtgagcgagttgttgtaccgtgagttcgtcaggccactggaggctggtcggcgcaatcccgtaccggtcgcggatccacttgaccatggagagcgtgaacgatttgccagttgggctgcgccggccttcctgattgaggtgcgcaacgatttgtgggtcggacagatgttgcgacagcctgcgtacgtgctcgacggtcgcagtgggatagcgcatcgcgtcggtgaccggcttgggcaaagtcacggtggtgtcggtacaggtaccgccctgccaacgcacatgtaggactacctgtctcgttgcgggcagcttctcgaacctgatgtaccgactcaagacactcactggtccttgcctgtgggcgcgcgagaccggctcccaggccacggaggggccatccgtgtagatgtgctcaaccgcatggcggccctcgctcgcccgcaatccgtgcgcgttggctgacttggtgttcacggaaataccaacgccttcagatccgacttttgcaacaacgcccttcttcgaccaactgggcctgccccctcactttacctcaacctctcgaaccgcccggtgcggacccgcatgccgggtggtaatggaatggacgcccccgtccgaaacggcatcgatgtgccaaagtggtaagtgcgtcgaagcacaaccatcatcgaaggaggcgtcaccatgagcgttactacatagggcattgacctcgccaagaatatctcccaggtccacggcgtgaacgagcacggcaagtccgtatcgaagaagcagctaaagcgacatcagatggcgacgttctttgcaaacccttccgccgagtctggttggcatggaagcctgcggtggggcccacttctgggcacgcaagctgcaggcgctcggccacacggtgcggctcatggctccccagttcgtcaagccctatgtgaagacgaataagaacgacatggccgatgcggaagcgatttgcgaagccgtggcgcggccgaatatgcggttcgtgcccatcaagaacgtcgaccagcaagcggttcttgcgctacaccgcgcccgtcaggggttcgtgcgggcccgcactgcgcaggcgaatcagattcgcgggctgctcggggaattcagtctcgtgatcccacggggtatcacgagcattgcccaacatgtgccgcagctcatcgaagacgccacaaatgaactgccaggctcgttccgtttgttggtacagcgcttgatcgatcatctaaaggaactcgatcgacaggtcgaagagctcgagatgcagatcaaggcttggcatcacgcgaatgacgccagccggaggttggctcgtgctccgtggaccatcagcgtgcgcaagtacgtgtcaccgcgcttggtaatgccgagcagcaacggtttgcctccgctcgaatgctgcctcggcaccaagcctagccatgccgtcaattgccgagcgttgctgaagcacttgccatccccgatcgaagcaacaagggcactggccgtgatcgggccgatcccgggaatctctgcgcgcgaggcgcctacttgcgttgcgctagcagcttgcggatggtgtcctcggtttcggcgtagctgccctcgccatagtgtttgtacacgatgcggccattggcatcgatcaggtagagggcgggccagtactggttgctaaaggccgaccaggtcgcataggcattgtcctgggcgaccggatagcggatatcgaagcgcctgatcgccgcctgcacgttggcggtcgatttctcgaacgggaattctggcgtgtggacgcccaccacgaccaggccctgatccttgtacttgtcgtgccactgcttcacgtatggcagcgtgttgatgcagttgccgcaggcataggtccagaagtcgaccagcacgactttaccgcgcaggccctccatggacagcggcggcgagttcagccactgatggatccccgtgaactcgggcgcgcggccctgatcgccaacggtcggggcgaggcctcgctggccgaaaacggcaatgccgactgccgcgatcagcagccctatcggtacgaggcggtataacttcgtgcgcatgatgctggcccgtgcagaattgtgatggaagcggatacccctgggggcccgtccgccctggcctcggccggagcgagggatcggcgcggtcagcaccttacgcggccctggccacccaggttgcatggcgtcaggcgtgggcaccgtccaggtacgggtcgacgctgcgcgacggctctgccgatacgccggtgcgatccatgccggccagcgaacgcgcgccgtccgcgaacggatcgacatagcgggcgccgtcgctgtacgggctgcgcggcaactgcaccgagcgggcgccgtcggtgtacgggtcgcgcgcaccgaagccggacgacgcggcctgcgcgccagcggcggcggccagcagggcgatggcgaagacaaaactcttggcagtattgacagtatttgcagtgttggcagtcatgatcagctcccagtaaatggtcatcggggttgcggcccaccgggattgcttgccttgcatttcgccgccgtgccacggattgcattgaaggcgaccgatgtatctggcccttagcgggtggacggcacttttgtcgccggacgtgtcggaaggtcgtcttgatacaaaggcgtacaaagtcggtacgtcgcccggaccgtcccgcgcagcgagagcgggccaatacgacgcgcgacgctctcgaagttctgcaaagaccgggcgggccgcttttgcccggcccggtgcgtgccgcggcaggcttttgtatggcaatgtatctggcggcacaggcttgacaatccggtacacaggcgccgatccacgacacaatccggctacgcggacggtgtctgatacggggaagccaagccctgtgagaaaacactgatcatgagcctgctgatactcgcctacctcggagggatactgaccatcctgagcccctgcatcctgccggtcctgccttttgtgctaagccgcaccggccagccgttcctgcgcggcaagctgccgatgctggccggcatggcgctgacttttgccgccgtcgccacgctggcgtcggccggcggcgcctgggctgtgcaggccaacgcctacgggcgcctggccgccctggcgctgctggcactgttcgggctctccctgctcctgccacaggtggcggatacgctggcgcggcccctggtggcgcttggcaaccgcctgaccggcaaccctgccgcctcgacccaggcagcgtcaccttcgccatggggatcgctgctgctcggcatcgccaccgggatgctatgggcaccctgcgcggggccgatcctcggcatagtgctgactgctgcggcgctgcagggcgcgagcgtctcgacctccctggcgctcgccgcctatgccgcgggcgcagcgacctcgctggcggccgcgctcggcatcggcgcacacatgtttgcagccatgaagcggtcgatgggtgccagtgaatgggtgcgccgggggctgggcgccggcgtgcttggcggcgtgcttgccatcgggctgggcgccgacaccggcctgctggcccgcctgtccgcgagcgggccggtgcggatcgagcaggcgctggtcgacgtgctgcacaaggcgcgccctgcgccccaggccgcgcatgcggcggcacagcccggcaccggcatgctgctggccgcgaatgacatgccggtggccatgccggaccgcctgccggtggagggccgcatgccggcactcgatggcgccgtgcaatggatcaactcggcaccgctcacgcgcgatcacctgcggggcaaagtcacgctggtctacttctggacatactcctgcatcaactgcatccgcaccctgccctatttgcgcgcgtgggcggacaagtacaaggagcagggcctgacggtgatcggcgtgcacacgcccgagttcgctttcgagaagtcaccggacaacgtgcagcgcgcagtcgcgaacttccgcatcggcttcccggtagccgtcgacagcaactaccgcatctggcgcgccttccagaacagctactggcccgctgcttattttgtcgatgcccacggcaatatccgccaccaccagttcggcgaaggtgactacgccaactcggaacgcgtgatccaggcgctgctggcggaagccggccgtccgtccacggcgcgcgatgtcgtcgccccgcttgcggaaggcgctcaggcggcaccggacctgtccaacctccgctccggcgaaacctacctcggctatctgcaggcggccaacttcgcctcgccgggcggcatgcggcaggatgctccacagcggtacagcgtcggcaagctccggctcaatcagtggggcctggccggtcaatggaccgtaggcgccgagcgggctgccctcgacaaggccgatggcagcatcgtccatcgtttccatgcacgcgacctgcacctggtactgggcccggcgcccgacggccgggcggtgcgcttcctggtgacgatcgacggcaagccccctggcgacagccatggcgccgacatcgatgccgccggcaacggtgcggtcacgcagacgcggctctatcagctggtgcgccaggcgggcaaggtgggcgagcacaccttcgagatccgcttcctggatcccggtgcgcaggcctatgccttcaccttcggctgacgccggtttccatccacgcattccacttatcgctggtgcgcagctgttcatccaccttgatattgccgcgctcgtcggtttcgacgcctgccttgtcgagtcccaggtcttccgtgttgggcactttccccacgccagcagcaggtgcgagccgtgcacatcgcgcgatcccgttgcgcaatcgagcccgacggcgatgccctccccggcccggcgcgcggtcaggcagttggcatcgaggcggattcccccccctcgcgctccaggatctcccgcagacacgtcttcgtcttcgcgctggatcaggcgcgggccatttttccaccacggtgacccttgcgccaaagcgccggtacatctgggcaaactccaggccgatgtagctgccgccaatgatgaccagatgctccggcaggtagtccacgtccatcatgcccgaattggtcaggtacgccaccgtgtcgagcccgggcatcggcggaacgagggcccgggcgccgacgttaataaagatgcgatcggcttgcagtagttcgccattgacgcgcacaccgtgcgcgctttccaagcgggcgtgccactggtagaccgtgccgttggccaggccgcgcatccactgttccacgccgctggcggagcgcccggcgatgtcgtccttgcgcgccttcacctgcctcatgtcgacagcgaccggcccgccaatcgtcacgccatagtcgcccgcccgccgcgcaagatgggccgcatacgcgctcgcgatcagggtcttggtaggaatgcggccggtgttcacgcaagtgccgccaaaatgcgcgcgctcgatgactgccactttcatgccggagccggacagccgcgcggcaagcgcggggccggcttgtccggtgccgatgatgatcgcgtcgaatccctgggccatcgcgctctccctggcttgtgccatgcccgctgcactcaccacgcgcagcggcgcattcgcgctggggatcgggcagcaatcgtacctggctcacgcccaagcatagacaaccgcgtgggatttcgcgatgtcacagaacagcgtcaattttcacgggctttcccggcctgtcctgcatttcaccatcaggccgcgcgaggatgagccggccaagcgccctgagcgaggcttgtcccctcagccaagcctgagctgcgcctccagcccaccgccctcccggttgtgcagcgtcagcgaaccgccgatcgccagcgccagctggtgcgcgatggccaggcccaggcccgtgccgccggtctcacggttgcgcgacgcttcgagccggacaaacggctgtatcacggattcgagcttctctgccgggatgccgggcccgcgatcaagcacgccgatcaccaccgcggcgccgtcgcggcgcactctcagttccgccgccccgccgaacttgatggcgttgtcagtcaggttggtcaggatgcggcgcagagcgtgcgggcgcgtcaggatggcgccgccggtattctgccggatagtgacggccttgccggtgtcctggtaatcgtagaccaggctctcgacgaaggacccgatatcgatccgcgatgccttttcgccgtcgccatgcatggcgcgcgcataggtcagcccctccttgaccagcgtctcgatctcggcaaggtcgtgcaccagcttgcgcttgtcttcggaatcctccgccatctcggcgcgcagcttcatgcgcgtgatcggcgtctgcaggtcgtgcgagattgccgccaggatctgcacgcgctcctcgacaaagcgtgcaatgcgctcgcgcatggcgttgaacgcgcgcgcggcacgcaccagttcagtcggaccggtctcggccagcggctcgctcgcggcgttcgggtcgagcgcgtcggcggcattggccagcgccaccaccgggcgcagcgacagccgtaccgccagccagcagcacagcaccagcagcaacagctgcagcaccagcacatagggcagccattgcgcgatcgcgggcggcttcggatgcacgtcgatggtcagcgggctgccatcgctgagggtgaggtgcgcctgcaagcgtttgccctgccccgggatcgattcgaccctgacggggaagcggccgccgctcgcttcggtaatgcggtcggcgatctcctgggcctgcgcgctcatctccggcacgcccggcaggcccggcccgagcacatactggtagttgccgcggttgacatgccgcagccactgcggccgctccgccgccggcacgcggtcgagaatcgcgatcgacgttgatacgtcggtttccagcgtgccgagcataacctggcgcgcggtgatgtagcgctccgcaaacagcacgccgaacgacaggccatgggccaccacgagcccggccagcaggatcaggaatagccgcgcgcccagcgtgcggggccacggcaaggcccggaggttcactgctgcgcctcccggatcgctaccggcatcgagaacacgtagccctcgctgcgcacggtcttgatgtagcggggctcgcgcgcatcgtccttgagatgctggcgcaaccggctgaccagcaggtcgaccgatcgctcgaacatttccgcttcgcggccctgcgtgaggctgagcagctggtcacggttgagcacgcgctgcggatggtcgacaaacacgcgcagcaagcggtattccgcgccactcagcgcgacgatgatgtgggccagtagctcgcgcgcggcgaaaggcttggggagatagtcgtcggcacccatttcaaggccgaggatgcgatcggtctcgtcgctgcgcgcggtcagcatcaggaccggggtggtcttgtgcttgccggcccgcagttcacggcacagcatcaggccatcatcgcccggcatcatcacgtccagcacgatcaggtcgacggcattggcctccaggatcgcgcacatttgcctgccatcctgcgcaacggtcacgcgcagcccattcttggccagataggtcgataccagctcccggatttcccggtcgtcatcgacaaccaagatatggtcgacgtgtgcatccatctctatcccctcggaaaagtacggtgaaccgccagtctgcgtcgacgccattgtatgagtgccggcgattctccgtgtatcgcactgtatccggtacagcaaacgccacagtccgatacatatttatttactcacgggacaccgccatcgtcggtggataccgcgcgcgggtcatgtggaccccttccttcccgtgaaagcaccctcggcggtggtggcaggaaaggtggtatctatgacattggcgccatgaccttgcgcacctaatcttgaactcacgcagccggccagccggtgagacttccctccagagaaccaggagctttgacatgacgactgacatccacgccggcaccgccctcatcaccggcgcatcttccggcatcggcgccatttatgcagaccgcctcgcccgccgcggccacgaccctggtggcacgcaaccgatcccggctcgaggcgctggcccgccggatcgccgacgacactggccgctcggtcgagatcgtgaccgctgacctgggccagcctgccgatgtccggcgcatcgaagacctgctgcgcaccgatgccagcatcactacgctggtcaacaatgccggcattggcgccgcggcaccgttgctggtgtcggatgtcgacaagatgcaggcgatgatcgagctcaacgtcacggctctgactcgcctgacctatgccgctgcgccggcattcgtggcgcgcggcgaaggcgccatcatcaatatcgcgtcggtcgtcgcggtggcgcccgagatcctgaatggcgcctatggcggctccaaggcgttcgtgctggcctttacccagtcgttgcagcatgagctcgccggcaagggggtacgcgtgcaggccgtgcttcccggcgcgacgcggaccgagttctgggacattgcgggccagccggtcgagaacctgccgcaaggcatcgtgatgagcggcgacgacctggtcgatgccgcgctggccgggctcgacctgggtgaagtgattaccgtgccatcgttgcctgacgaagccgactggaaagcgttcgaggctgcacgtgccgcgctcggccccagcctgtcgcgcgaccagcccgcggcccggtacggcgttgcgcggtagttcccaggtaacctgaacggtccgcgcatggcctaatgccgttcagcgaaccaccgtcgttcccgcgtaggcgggaacccagtgacttcatccccgaaggggacgtgaaagacgctggattgctcgctacgttcgcccttcgggcagtcccttggacgtccaatgcgctgtgcgcattgtcccgccttcgcggtaatgaccgtggtggttgatacctttactgaacggtatttccgcgcatggccggcattttccgccagtacgtcgcggaatacgacggctacgcgacctgcaacgcatcgccgcgcgccatgcgccggattgcctgcggcggctgtcccgaatgcccgcaggaatgcccgccgcatgcgctcgcggtcgccgaagccggtatcccgcgcgaccacgtcaatggcgtggcggccgctttccatcatcagccgggccgcttccacgcgcaggtgctccacggccttggccggggtctgcccggtctcatcccggaatgcgcgggcaaactggcgcgggctcaggtgcgccgcttaggcaagttgatccaccgagagctcccgctgcaggttctgccgcgcaaagtccagcgcggcacggatgcggtcagagcgcggttccaggtccagcagcgccgagaactgcgactgcccgccgggcccggcggtgatacacgacgagcttcctgacgacatcgcgcgcaacggcgcccccggcatctttctccacaagcgccagcgctaggtcgatgcaggccgacatgccggccgaggtccagaccgggccgtcgatgatgaagatgcggtcttcctccaccccgacttccgggaagcgccggcgcaactgctccgcgtagtaccagtgcgtagtggcgcggcggccgtccagcagcccagcctccgccaggttgaaggcgccggtgcaggtggcgccaatgcgccgcgaggtccgcgcagcgcgccgcaggaatatcaccagtgcgggcggcgcgggcaggacgtcgttatctcccactaccagcaccgtatcgaagcggcgcctgccgaacggctcggtgctgaccgaaaaacccccctgaactcggcaccaacccgccatgttcggacagaggtgaacctcgtacatcggctgtgcgagcgagcggttggcaaattccagcaccgtcgagaccgccaggttcaatgcctggaagcctggatacagggctagggctacgtggcgcatagcgaactccatggagcggtcggagagtgtccgtccgtgacacgcttacgccatcagcttctccttcgtgatggggagatcccgaatcctcttgccggtggcgtggtataccgcattggcgacagcggcggcaaggccggtaatcccgatctccccaatgccgcacgcgccgaattcattgaattcgaggtcgggatggttgagcaggatcacgtcgatccccggctggtctgcatggaccggaacggcatactcagcatagttgttgttgcccggcatgccgtcgcgtccgtcatactcggtggcttcgaacaaagccatgccgacgcccatcacgatcgcgccttccacctggttgcgcgcagtgaccgggttgatgacccgccccacatcgatcgcgctcacgaccctggcgacgcgcaaccgtgaaatgccgggatcccagcgcacctcaacgaagtgggcgccgaaagacgtgcaggacagcttgtcggtcggtgtgccgccggtccgggcaaagccctccgcgctggcaaaacgctgagcattgaggatcgaggcatgatcgacggcgcgcttgccgtcggtcaggcggccattctgcgtcgcgaacgtgcgcagctgaccgatcgcgttgcgcgtggcctcggcaacggccgggagcacgctggccgtcgcccacgaaccgccggctaccggagccgccggaaacgccgaatcgcccagcctgacatcgatcttttcaaatggcagctcggtcagttcgctgaccgtttgcgcaacgatggtgtacatgcccgtgccgatgtcctggattgcgcagatcaccgcggcggtgccatcgctgcgcaggaggacacgagcctcggctggcgagcgccaggcgtcccagttgcacaccgccatgccgtagccgacgatctcggtgccggccgtcatcgaacccggcctcggatcgcgccggtcccagccgaacttgcggctgccctgcccgatggcccatcgttcaggcatgcagcgggttcggcttctccggatcgatcccgtacttgtgaatcgcttccgagacgcgagtgccggggatggtcccctcatccgccagcgccttcaatgccgcgatcgcgatccagtggcgatccacctcgaagaagtggcgcagcgccgcgcgggtatcggagcggccgaacccgtcagtgcccagcacgacgaatttctgcggcacataggcgcggatctggtccgcgagcgcacggatatagtcggtcgcgacaatgaccggccccggcgcatcctgcagccgccgggtcacgtgcggaacgcgcggcggcgcctcgggatgcagcaggttgtgccgttcggccgcacggccgtcgcgtgccagttccgtcaggcccggcacgccccacacatccgcagcgacgccccagtcctgctgcagcaatgcagctgcggcgatgacctcattgaagatggtgccggcgcccatcagttgcacgcgcggacaggattcggcagattctgccttgctgaaggcgtacatgcccttgaggatatcctgcgcgacgctcgggccggccggcatggccggctgcgcataggtctcgttcatgacggtgatgtagtagtagacgtcttcctgctcctgcaccatgcggcgcaggccgtcctgtacgatcacagccaactcgtacgcaaacgacgggtcatagctgatgcagttcggcaccgacgatgcccacagcagcgaatgtccatcctcgtgctgcaggccttcgccgttgatcgtggtccgtccggagattccgcccagcaggaagccgcgcgcccgcatatcggccgccgcccaggcgagatcgcccacgcgctggaagccgaacatggagtagaagatatagaacggcaccatgggctcgccatgcgtggagtacgatgtcgcggcagcgatccagtcggccatgccccccgcttcattgatgccctcctgcaggaattggccggtcgtcgactccttgtaggatgtcagcgtctcggcatcctgcggggtgtagcgctggccgtcctggttccagatgccgatctgccggaacagtccttccatgccaaacgtgcgggactcgtccggtacgatcggcacgatgcgccggcccagttccttgtcccgcagcagcgtgcccaggatgcgaacgaaggccatcgtggtcgacatgccccgcccttcgggcgtggccctgagcagcgcgtcgaatgccgacaaggcgggcgccggcagcgatgcggctttctggcgccgcgcgggcaggtagccgcccagcgcctcgcggcgtccgcgcatgtaggtgagctctttcgatccctcgggcaagctgatatacgggacgtcttcgatttccgcatccgcaacgggcaatgcatacttgtcgcgcaaggccagcagggcctcccgctgcaccttcttctgctggtggttgacgttggaggcctggccctggtcgcccatgccatagcccttgatggtcttggccaggatcacggtcggcacgtcgctgccgcgcgcggcctcagcgaatgcggtaaagaccttcaccggatcgtggccgccgcggtccaggctccagaggtcatcgtcggtgtagtcggccaccagcgccttcagctcaggcgtattgaagaaatgctcgcgcaggtatgccccggatttcgaacggtaggtctggtattcgccgtcgacgacctccatcatgcgccgtgccagcgccccactcttgtcgcgtgcgaacaggtcgtcccagcggccaccccatagcaccttgatcacccgccagccagcgcccaggaagatgctttccagttcctgcacgatcttgccgttgccgcgcaccggcccgtccaggcgctgaagattggcgttgacgacgaacacaaggttgcccaggcgctccctggccgccatgccgatcgcgcccagggactcgggctcgtccatttcgccgtcgccaaggaatacccataccttccggtcatcggtcttcgcgatgccgcgcgcctgcaggtacttcatgaaacgggtctggtagatcgccatcaacgggccgagccccatcgaaacggtgggaaactgccagaaatcgggcatcagccacgggtgggggtaggaggacagcccttccccgccgacttcgcgccggtagttgtcgagttgcttggcatccagccggccgagcaggaacgcgcgcgcgtagatgccgggcgccacgtggccttgcacgaagacaaggtcgccgccgtgatccgctgtgggcgcgcgccagaaatggctgaagcccacgtcatagagcgtggccgcggaggcaaacgaggcgatatgcccgccgacattcgaagtcttgccggcccgcaccaccatcgccatggcattccaccgggtataggagcgaatgcgtcgctcaatctcgcggtcgcctggcatgcgtggttgctggtcgacggcaatggtattgacgtaaggcgtgccgccagagtgcggctgcaattgcccgcgcagccgcgcatgggcaatctgccgctcgatgagatagtgcgcacgtgccggcccgacgttgccgaggacgccctccagggcttccagccattcggctgtctcctgagggtcgtcgtcccgtggatcaattgtcaatgcgatttcgtcatgttgcgtggcggtcacggcaagtctccgttaaggaattcggtgaaaaccagcataggcgataactacgactttacaagtcttagttatcgcggagacttcagggcaaaccatgggctgttcatgtctggcacttgacgggaaacagagctgcaagatcttttcccgatgcttgtctcggcgcagtccatgtgctcgcttgcacttcgatggacgatcgactatcgttactacgactataatgatcgtagttaaagcaaccggagttcactatgaaaccgatccactggatcagcgcacttggcgccaccgcgatcctgtccaccggcgtgaccgcatgggcatccgcttccgacctggcctgggcgaccagccgccccatgactgccggccacgacctgaaaggcgtatcgacgcaaccgggtcacacccgcagcctccgcgatacgctgatcgccggccaggacctgagcggcgtttccgctacgccaagccgcgccggcgagaccggcgcgggggatgaagccagcaaggcttcggggccgcccaacaaatcgctgcctcggctcgcctgaggctgtgcctcccataacggaaaggcgtcccgggactgaaagccgcagaccggcatccacactacccgcttcacgcgttttgccaaggaaacagacatgaaagcccaacaccttcttttgccctttctcgccgccaccgtgatggcatttcccgtcgccgcagccgcacatggaaccggtgacacggtcaaggagaacttctcccgggccatccccaacatacccggtaagtcacttatcgcgctggaagtggattacgcacccggcgcctcgtccttgcctcactaccacgccaagtcggcattcatctatgcctatgtcgtctcgggcagcatcgccagcaaggtcgatgacgggccggaacgggtctacaaggcgggcgagagcttccatgaagagccgggctcgcaccatgccgtcagccgcaacgcgagcaagtcaaagcccgccaagctgctggccgtgtttatcgtggacagcggcgaaaaggacctgaccacttacgaaaggagcgcgaaatgagactggactacacaaaggccgccccgggtggcgtgaaggcattcggcagtgtctacggctacgtcatgcagtccggactcgatgatgtcctggtggagctggtctacctgcgtgtcagccagatcaacggctgcgcctactgccttgacatgcacacgcgagacctggtgaagaggggcgtgtcggtcggcaagctcgcgctcgtgcaggtctggcacgaagcgggcgccctcttcagtgaccgcgagaaggccgcactggcgtgggccgagaccgtgacccgcgtttccgagacacatgtcccggacgacgcatttggagcggcctctgccgtcttcagtgaaaaggaactcgctgacctgaccatggcgatcagtctgatgaatgcattcaaccgcctcgccatcagcttccgccgtgcgccgcaagtcgagggccagggcgacgcatgaccgggccgtcggtcgcgggacagggccagctcgctggccctgcttcgccgacgcagattttgagacgccactttcactaccattttcaagctattggcatgctctaccccgaactgttcaaatcgttggaagcggtccgctggcacatggacaaggacatcccctgggacaccttcgacgccagcctgctgacagacgaccaggccaagaccatccgcatgaacgcgatcacggaatggtcggccctgcccgccaccgagatgttcctgcgcgacaaccgccacgattccgacttttcggcgttcatgagcatctggttcttcgaggagcagaagcactcgctggtgctgatggagtacctgcaccgtttccgcccggacctggtgccgaccgaggaagagctgcatgcggtgcgcttcgaattcgacccggcgccgccgctggaaacgctgatgctgcatttttgcggcgagatccgcctgaaccactggtaccgccgtgccgccgaatggcactcggaaccggtgatcaagcatatctaccgtaccctgtcgcaggacgaagcccgccacggcggcgcctacctgcgctacatgaagaaatacctggcccagttcggcgacaccgcgcgcgccgcgtttgccaagatcggcgtgttgatggcatcggcgcggcgcaccgaaaaaccgctgcacccgaccagcctgcacgtcaacaaggcgctgttccccaacgacaccgtgcagtcgcgcctgcccgacccggactggctgggaaaatggctggacgagcagatccgcttcgacgaaggctgggagaagaaggtcatcgaacggatcctgcacaatatgtcgctgctgttcgagcgcacctttgaaagcgtgcaggacctgaaccgctaccgcagggagctggggaagccgcaacaggacgcgcgcgatgctgcatttccccactagcacgctgattttcatacgaagccagcagcgtgtgacagaaacgggggccgtgagcgcgaaggcaggcctgcgaagcaagcggctcgcagagtgccggtgcgaatcgcttccacggtttgccgcggtcctgcagatgcggggtagtgtccaagcgcgaccgcgtcagcatcctgccggcacgatgcgccaggtacgcggcccgctttcgtggacactgttgccgccggcatccacggcgacaaccacgggcaggttctccacatcgaactcgtagatggcttccatgccgagatcgccaaacgcaaggacacgcgagaacctgaccgccttggagatcagataggcagccccaccggttgctgccagatagacgcagccgttcttcacgatcgcgctgatcgcctccggcccgcgctcggcattgccgatcatgccgagcaagccggtggaagccagcatgcgcccggcaaacttgtccatccgtgtggatgtggtcgggccgcaagggcctactacctcgtcacgcacaggatcggcgggcccgacgtagtagatcatgcgattgcggaactccatcggcaagggctggccacgcgcgagcatgtcgtcgatccgctgtgcgcggcatcgcgtccggtggtattccccccgtaaagtaagcctcgcgggaagtagaattttctagcagcggtaccttaggaaattttgcatgaagaccccccgattcacggacagccagatcatcgccatcttgaaacagaccgaagccggtacgccggttccggagctctgtcgggaacatggcatgagtagcgccagtttttacaaatgacgagccaagtatggcggcatggatgcagcgctaatgacccggatgaaggaactggaagccgagaatgcccgcctcaagaagatgtatgccgaggagcgcctgaaggcggatgtcctgaaggaagccatcgagaaaaagtggtaaggccatctcaccgacatgagatggccatgcgtgcagtgcgagaacgcgctctgacggtcaagacagcctctcgcagctttcggcgtgagcgagacgtgctaccggtatcaggccaagagctcggcggaggacgaggtcatcgccgattggctggtcaagctgacgcacaaccagcgtaattggggcttcggtctgtgcttcctctacctgcgcaacgtcaaaggcttcggctggaaccacaagccttcgtctatcgcatctaccggcagttggagttgaacctgcgcatcaagccccgaaagcggctggtgcgtgagcagcccgaaccgttggcagtgccattggcgctgaacgaaagctggtcgatggacttcatgcacgaccagttggccgactggccgcagcatccggctgttcaatgtcattgacaacttcaaccgagagggtctgtgcatcgacgaggacttcccgctgccgtcaccacgagtgatccgcgccctggatcaggtcatcgagtggcgagggccgccgcaggcgattcggtgcgacaacggcccggagtatgtcagcgaagcgctgaaggactgggcagacaagcggggaatccggttgcagttcgtccagccgggcaagcctcaacagaacgcctatatcgagcggtacaaccggaccgtgcggtatgactggctggcgcatttcctgttcgaaaccgtcgccgaggtccgggagtacgcgacaaatggctatggtcctacaatcacgaacgcccgaatatggcgcttggtcgcatcacaccgaaacaacgatcggccaacttggcctagcctctacttccagcgaccgctagaaatgggggaataccctaccggctcgaatgcgcgttcgagtcgcgccgcacgatccgacagccattggacaacctgcacaccgtagccggccggcgtccaaagacatgtaagctcgtcaggaatcggatacttgcacaggttgtggcaagcaagcttcagttgcagtggtcgcctgagcaagttgcaggctggctcaagcacgcatatgcggtcaacaagggctaccaggtgtcacacgagacgatctatcgtagcctctacatacaggcccgcggtgcgctgaagaaggaactgctggaacacctgaggcgctgccggagctgttgccgcacgcgtgtccttcaatgccatcgttgtcaccagcgtgccagtcgtcacgaccagtaccccacctgccaatagccatcgccgcctgccggcccggccgttctgtctgtctgccatgctctgctgcccaatccgtccattagttcatcggtgattcgtccggcagcgcgtcgcgcgcctgccgggattccctgctcggcttcagttggccgaaccgggtgtggcggcgaccacgccggccggtcccgcttgcggccgcgcgatccgctgccgcgcccattcggcgacaaacagtgccaccgccagaaagaccgcacccacgagaccaagggcatgacggtcgaacgaggcgatagccgcgccgccgatgacgcctgacatcgatacgccaacgtagatcgccgccgagttcagccccaacagcagcggcgaggcagccggcgtgatgctgataagccggtgctgctgcgggaccagcacgccccagccgcacacgccccagacgatcagcgcggggaccgcggtcaccagcgatgccgacgtcagcggcaacagggcgaagtcgatgaccagcacggcgatggccgcgttgatgatgcggcggctgccgtagcggtcggtcaggccgcccgcggcaagattgccgacggtggccgccacgccccacagcagcagcaaggccgccagcacgagcgggtcaccgccagtggcacggtcgaagctcaggccgatgtaggtgtagacgaggaagaggcccgcatagatcatccaggtcgtcagcagcgtcaacagcacgcgagtgtccgccagcggtgcaaggcggcgcgacaggctgatggccggcggcgtcgggatctccggcaggcgccacgctacgcccagcccggccagcgtgccgacggcggccacgaaccacatcgtcgcgcgccagtccagcgcgccgccgatgaaggtgcccagcggcgcacccagcgccgttgcactggacagaccgccgatcacgatggccagcgcgcgcccgcgctgctccggcggcaccagcgacgcgccagtggccgtcgcggtcgggctgaacatggcggcgccaaggcccgcgatgagccggctggccagcacgagctcgatattcggcgccacagcggtcaccacgttacccaccacgaacaccgcaagccccgtgagcagcaaccgcttgcgtggccagttcgctgccgccgcagcgatgaccggtgacagcagcgcatagctgatcgcgtacagcgtcaccatctggccggccagcgccaccgatacgccaagcgaagccgaaacctgcgacagcacgccagccaccacgaagctgtccgtgccaatcgcgaacatgccgctggccagaacgatcagacgtttatccatgtgaatgtcctctgcggcacatcgagccgcgcgttgggaaatcgtgacgggacgcatcccacaaaagtttcttgatgaaacttacgatagctcattgagttgcttcatgcaactttctcgtctaggatgagtgttatgtaacgcaagacgtccgcttatgcaccgcaagactttcacagggatgaactgctccgtggctggcgcgctggagcaggtcggcgaatggtggagcctgctcatcgtgcgagagtgcatgatgggcactacgcgctttgacgacttccagcagcgcctgggtatcgctcgaaatgtgctcgccacgcggctgaacaccctaattgagcacggggtgctggcgaaggtgatcgccgagggcgcggaacggcgcaccgagtaccggctgacggaaaagggcgaggcgctctatcctgtcatcgcggggttgatgcaatggggcgataaatggtgcacccaacgcacgcccatccgcctcgtcgaggacagcaccggcgaaccggtcgaaccggtcgcattgcgcgtgggtccccgcacgctgggcttgcgcgacgtccgcctggaacccggcgacggcgcgaccgagcgaacggctgagatcatcgacgcccgcaacaagtccattctcggcaagtaaacccgatcacgcatcgcttgtcgcggcgctgccagaacccgcgcaaatggcgcgttccggcttgcggaagggaattgctacgtgctgaagtacctgtcaacgaattcacgacggcccggccggccagctggcttcccctgccctacttgcccggcaccacgagaggggcgcccttcgtgacgatataagacgcgagttccgaagcctcgccgcttccaacattcctggccgaatgcggcgtgcctgccggaatgaaaagcgaatcccccgccttcagcgtgaccggcttctggtcgccaagctggtactcaagggttcccttcagcacgtgggcgatctcttcgccggggtgcgagtgcttcggcgcgaaggcgcccggatcaaagtcgacgcggacctgaatggcttcgcggcccgagggtcacagaagtagacctggatatccgtggccacggtaaagcgcttgtgatcggccatctcttttccgtgatcccacgtcagcgatttgtagagctcctggggcagtttgcgcacatgcttgatgagtgcattgacgactgtctcgctgtctttgctggcgaccttcaccagcatcacaaacctcgtctgacgctcgaccaaggtgggcctatcttctatcgcctgccgaggatctggccggcttgcgcagccgcgcaatcgtcgcggcattcctcgcaacgggtattacagcgggggaagcgcgagcagcgcgttgagagatctgatcgcagatgcgaacccgccctattttttgtgtcggcgcacgggatgcgcgcacggttcacctcgccgacttcgcgatacctgtactgcggacttggtgtgcccgccgctcgatcctccccgtcgagggcgacctacttttcacgctcacccccgatggtcgaccgatcagcgacatgagcttcggtcggatcgtggccaccgcacttgccgcaatggggttctccggtgcagagccaagcccccgcacgttgcgcaataccttctgccggcgccatctcctggcaggcagctcacgtgatgaggtcagccgcatgttggggctagccagccatcgcacttgtgaccgaattgctgcgacgctgccggcagaggaggagccaatgcaccaaaatagctcgcctgacgcgccagcaaaggccgaggaataaggaatatcatggatattccactggacactgtgaaggtcatttaccgccgtgcgaccgcgtggcgcacgacattggagagggcctcgcgcacgatctgcacgatatggaactcttcgttggcactgagctggcagcccttgagccggttgtccagcgtcatggccacgctgctgcgcgcgccatactcatcaagggcctcctccagcgccgcggccaggccctgcacattgatctgcgtgcggaacgtcgtgatcagttcgcgcagcttgcgataggcgccgttcaggccgtcgcgcagttcttccgcggtcgcctccaggccctcgtgcgcgtcccctcggtcggccagggtctgcaggcggctgacctaggacagcgactgcgccagcgagtcgtgcagttcgcgcgccatggccgtgcgctcctcgatcagcgctacccggcgccctgcctgcatgcgccggaagttgccgatcgccagggaggccgcggccaccaaccggcgcgcgccgcgccggcctgccgccgccgcggtgccgcgccccggcgttggcccgatcccgcccctccacgactaccgtgcgctgatcgacggtctcgaggacatcgtcttcgagaccgacgcggaggctgcctttgagtccgcgtcgcaccggggtaacccggccgtcctgcaccatctgcaacttcaacgtaggcacgccgctggtggtggcgatcgaggcgtggccacagttattgcgcaaggaactgatggggtagccgcggtcgagcaataacaggtcgtcggattgtaggcacgtcggatctgacacaaggacggcatgcgatgagctgcctggtcgaggtgtcgcgcgagccgtagcgggcggctactggccgccctgcgcaaacatcggcatgtcccgcaggatatgttcgagcagcttgagcgccgccgccggtagcggccgcccggccttggccagcacgcgcgcctgggtgcccctgaacagcggatgatcgatgggcaccaccgtgagcgttccggcagcgatttcgcgatacgcggcgaactcgccgccgatcagcgtcatgtagttttcgtaggtaacaaactgcttgagcgccgtcagtgaattggtgaccagcgtcggccggatcctaatgttctccgcgaattcgagcatcttggcggcgtgcccgacgccgaatgacgccggcatcatggccagcggccaggacaagatgtccttggcgctggccgcgccgccacgcaatgccaagggatggtcgggccgcaccagcaggccgaccggctgcgacgaactcgccagatactcgatgcgcggatgtggtggcggattgaaggcaagtccgatgtgcgcgcgactttcggccacggcgtcgagcacctgatccacgccgaggatctccatgccgatgtcgagcagcgggtactgcgcacagaacggcgctagcacctcattgaccagtgcatcgacgtacccctcgctcaggaccacctggacctgcccctgccgcagacccttgagggcatggagctggtcctcaagcttctcctgatgtgaccggtagtcgcgccagaactcaagcagatgcgcggcggcctcggtcggcctgacgccacgcgcctctcgctcgaacagcgtcgtgccaagttcgtcctcgagcagccggatctgccgggtgatcaccgatggcgatgtgttgagattctccgcagcgcctcgaatggtgccttgctcgagcacttcgcggaagtagcgcagccgctgctgattgatttcacgcatgtcgaaccatccacttggtcgatgacagactttacaccataccgatgcgttgccctgaaggcaacgaagtgtggacatggttgctgttggagattgccattgtcgctggcactatccgatccatcaacgcggtacacataaaagacattggagactggcgtgctggcgatcccgagagaaagcgcagtagacggcacctctgccctctacaacaagatcaactggcggctaatgccattcctgctgatctgctacctgttcgcctacctcgatcgcgtcaacatcggctttgcgaagcttcagatgcaaggcgacctcggtttctccgatgccgcatatggcgtgggcgcggggatcttctttatcggctacgtgctgttcgagataccgagcaacctggtgctgccgcgcattggcgcacgcaagaccttcagccgcatcctcgtactctggggcatcacctcggcctgcatgctgttcgtgcgcaacgtgccgatgttctacgccatgcgtttcctgctcggcatcttcgaagcaggctttgcaccgggcatgatctactacctgtcctgctggtacgggccgcagcgcatggcgcgcgccattgcgatcgtgttccttgccggcccgctcggcggcattgtcggcggcccggtctcggcatggctaatcaccgcgctctcaggcaccggtggcctggccggctggcaatggatgttcctggtcgaaggcctgccctgcgtcctgctcggcgtgctcgccctgtatttcgtgccgaaccgtcccgccgacgccgcctggctcaccgagcaggaaaagcgcctgctcgccaacgaaatcggatccagcgcggcgcacaatcattccttcctggccgtggctcgcgatgtccgggtctatgtgctggccctggcgtacttctgcatcatcgccgcgatctatgcgatcagcttctggctgccgaccttcatcaaggcccagggcgtgaacgacaccgtgcaactcggctggtactcggccctgccctatgtcgccgcggccttcggcatgtactacatgggccggcgctcggaccgggtcggggagcgccgtttccacagtgccgtgcccgcaaccgtcggcggattgctgctcgccgcgtccatcctcgtcgacggcaatcttgcggcatcgctgatgttgctcacgctcggtacctgcgcgctgtggatgacctacacggtgttctgggccatgccttccgaatacatcaagggcccggcggccgcaggcggcatcgcactgatcaacacgatcgggctatcgggcggcttctggggcccggccatcattggatgggccaagaccgccaccggcaaccttcacctcggtgtgctgatcctggccgcgctgccaatcatcgccgcactgatcatccttgccaacaagctgcccgcgaagcggtaacaaggagtcgtcatgcttctacatctctccacctggtccgaaatcgagcagttcctcaagcgcagccgcacgatcgtcgtgccgatcggctccaacgaacagcacggtcccacagggctgctgggtacggactggctgtgtcccgaaatcattgcgcgtgaatcggaaaaatccgccgatatcctcgtggcccccacgtttaacatcggcatggcacagcatcacctcggctttcccggcaccatctcgctgcgcccgtcgacgttcatcgccgcgatcggcgactggacccgctcgctggtggtgcatggtttcgaaaagatcctgttcctgaacggccatggcggcaatgtctcgtcgattgatgccgcgttctccgagctgtacgccgaagcaagctttgcgcgtcgtcgtgccggcttcgcactgaaagtctgcaactggtgggatctcgaaggtgtgggcgaactggcacgagaccagttcccgaccggccacggctcacatgccacaccttcggaaattgcgatcacgcagtacgcctttcccgattcggtcaagtcggccgactatgccccgcccattgcgccgaccggcccgatccgcgaagccctcgacttccgggcccgcttcccggacggacgcatcggttccgatccaggcctggcaacgcgcgagaaaggccgcgcactggtcgaactggccgcgcagtccctggtgcgggaactcgaggccttcggccgcgaaccgatgccggactgaaaccggcccgccggcgccacatgactcgcgatgactccccgtggcgccagtcatcttgccctccatcgacaagcatcatgcaatcacacgatatccaccaaagactaaaagcactcgatatcgagctgtcccccgcaggcgcgccggctgccgcgtacgtcatgagcgcgcagagcggcaaccttgtctacctctccggccacattgcgaagaagaacggcaacgtgtgggttggcaagctcggcgccacgatgtcggcggacgaggggcgcgcagcggcccgcgcggtcgcgatcgatctgctgtcgacgctacaggcccacaccggcgacctgaatcgcgtcaaacgcatcgtcaaggtcatgagcctggtcaattcaacgcccgacttcaccgagcagcatctggtcaccaacggcgcatcggagctgttcgtcgacgtgttcggcgatgccggcaaacatgcacggtcggcatttggtgtcgcacagattccgctgggagcctgcgtggagatcgaagtctgcgtcgaactggactgaggcatcagatcaaatcaaacatcgcgtgcagatgaactctcaaggttcttcagcgcggtaaccagtgcacacccgaagccacacaaccaggcaagcagccagatgaacgcccccactccgtcctcctctcttacccccgtcggtccccgcatcaacagcgagcggctctgggaacatgtctgcgccatggcaaggatcggcgccacggccaaaggcggtgtcaaccgccaggcgctcaccgcggaagacacccagggcaagatgttattgctccagtgggcatccaggcgaggctatcagacgtcgattgacccgatcggcaatctgttcatccgccgccccggaaggaatccgggcctcagtccggtattgacgggttcacatcttgactcccagccgaccggaggcagattcgacggtgtctacggcgtgcttgccggtttcgaggtactcgagacgcttgacgatcacggcattgagaccgaacgccagatcgagctcgttgtgtggatgaacgaggagggatcaaggttccccccccccacgatgggctccgccgttgcggccggcgcgctgccgctggccgacgcattggccatcaaggacgtcagcgggatcgatgtggaacgcgcattgaaggcccagatcgccgagtttccggttctggaggagcgcccgcttggtatgagcggctttgcctatatcgaagcccacatcgagcagggccccgtccttgaaaaccaggcatgcgatgtgggcattgtcacgggcattcaaggacttcatgcctacgagatccaactgctaggcgccgaggcccacgcgggcacgacaccgctgcggcatcgcaaggatgcattggtggccgcgaccaagctcatcggatacattcgcgccgcgatagacgaccccgaggatattctgcgcttcaccgtcggaaggctggaggtttatccgggatcacccaacaccgtgccaggcagggtgacattcaatatcgatctgcggcatcccgaccccgattccctccggcgtgccggcgagacgatccttcaactttgcgctggcgagatcgaaggctgcccggtgtcagcgaaggttctgttgaggtccacgccggtaacgttcgacgaccgcgtggtggcaaccgtgcgcagggccgcaggcggtcgggccatgaaattcctgaacatcgtttccggcgcgactcacgacgccaagtacaccgcacaacatattcccactgggatgattttcgtgccttgcgaaaagggtatcagccacaacgaggccgagaacgcgcgcgaagtcgatgtcgcggctggggcgcaagttctctgcgacgccatcctcgcgatcatgtcggaacaactataacccgttccaacgtccatatcgaccccggcacgccgcacactggcagccatcggacacacggccaccgtgaagtgtttgtcgacacgaagcgaagttgccaggcgatgacgccagaaccatttcggccacggatgccggcgccgctgcgcaccgtggcgacgccatacacaccaatcaaaggagaggtctgtgtctcaaaaggaccaaaattcggggagcggggccgaccgtgcgtccctcgatcgaaaagtagatatgcgcctgctgccactgctgttcatcggcttcatgttcgcctatctggacagagtcaacgtaggctttgcaaagcttcagatgcagagcgacctcggcttctccgacgccgcctacggcatcggggcaggaatatttttcgtgggctatgtcctgttcgaggtaccaagcaatctcttgctgcccaaggttggcgcccggcttaccttcagccgaatcatggtgctctggggtattacctcgatgtgcatggtgttcgtcaaaagcgtcccggtgttctacgccctgcgctttctgctgggcgtcttcgaagccggcttcgcgccgggcgtcctgttctacctgtcgcgctggtatggtccgagccgcatcgccggcgcaatttcgatggtttggcttgcgggtcctttcagcggaattgtgggcgggccgctgtcggcgtggatcatgacggccttcgccggtacggccagcctcgcaggttggcaatggatgtttctcattgaaggcgccccaaccctcgtgcttggcgtcgcggcctacttcctgctcgtcgatgacccatccaacgcgaaatggctcaacgacacggagaagcgcgcgctagccgcggaaacgaacacggctacagaccggcggcacgaatcgtttctcatggtactgcgtgatcccaaggtgtacatcctcgcggtagcctatctgtgcatcatcgcgccgatctacgccttgagcttctggctgccgacgatcatcaaatccgccggcgtcaccagcacacagaccctcggttggtatgcggcgattccttatgtggcagcggcgtttgccatcttcttcggcggccgcagctccgacaggcgtcaagagcgtcgaatccacatcgccgtgccggctgccataagcagtctttgcttcattgcctggtacctcgccgacggcaatctcgcagtgacactggtatgcgttaccgtcgctaccggcctgatgtggatggccaacatcgtcttttgggcgattccgcccgcgtacatcaagggcaacgcacgagcaggagccattgccctgatcaatacgattggcctgtctggcggcttcttcggcccaaccatcatcggttggtcgaaatccgtgagcggcagcatctaccccgggttcctgctgatggcggcgatgttgctgatgtgtgcattcatcatcatgttcctgcgcctgaagcccaggggcgatactgcgcctcgccacgagtcgcccatgccggccagcgtgcgtcaagcgaagtaaattcctatggctagtgatccgcctgccactaggcaatcgactatgaagcagccggggggcgatgcgggacaacctccttcattgcctgcggtcagacacgcaacccttgcgatgcgcgctctcccgatgtctccctgaaagagaacgtcacatgaaactcgccgaatacaccgcccttgacggcatggggctgcatcacctcatcgccacgcgagaagtgaccgcaatggaagtggcgctagccgcattggctgccatcgaggccgtcaatccccaagtaaatgctgtgctcgattactggcccgaagaggtggagatacagtcagctggcatcgtgagtgtcgatccgagacccctaggtggcgtgccatttctcctcaaggatctcggcgtcaccatgcagggacgcaggagcgaaatgtgcagtcgcctggcgatgggaaccgtcgcaaaggaagactcgtacgtaatgacgagcttccgtcaggcaggcctgattacgctcgggcgaacaaccatgccagaactggcggttagcacgacgacggaacccgtgctgtacggcccgacgagaaatccctggagtctgcagcatggcgcgggcggatcgagcggcggtgcgggagcggcggtggccgccggtatcgttccgattgcgcatgcgacggacggcggcggatcgatacgggtgccggccgcctgcaacgggctgttcggtctgaagccgaccaggggacgcgtgtcgaacgggccccacgtggacgaagtatggaacgggctgggcgtgcattttgccgtgagccgaacggtgcgcgatagtgcagcgctgcttgatggcatccacggcggcggcgtgggcgagccctactacattgccccacccaaagacagctatctgtcggagatccgacagcagccgggaaatctgaagatcgggttcatgatgaatccattcagtgccgcgcgtactgacacgggggttgcggatgccttgagcaaggtggccaggacactcgagtccctgggtcatcatgtccatgaagtagcgccagacttaggtgtgagctgggacgcatttgtgcaatgcaatgcgaaaatctgggctgccaacgcagcgctccggatcaacgacattgccgcagccacgggacgaacagtggatgaaaagcacctcgaaccggcaacgctcgcgctctatcgatacggcattgaggttggcgccgtagagctcctgtcggcattgcaggtcaggaataccgtcacacgggcgctggggcggttcttcggaaactacgacattctgctgacaccgacgttacccagacttccgcctcggattggtgaatacaaccggataggaacatccgtcgatgggcttgactggattgcgcacgttcttagccagtcaccgtttaccgcgttatcgaacgtgacgggaacgccagcaatgtcagtgccgctttccatcgaccctcaatcggatctgccaatcggctcgcattttatgtctggcttcgggcgggagcacacgctgttccgtctggccgcacaattggaagcggcatgtccttggcgcgaacggcggccaccggtatgggcaggatcaatcgtcaacacgacgtcgcaaccgtagcagccactatccaggcagcacgtggcgggatcacagctttattgtcgccgtcgtggcacttttggcacggtgtacgaaagtcttttgagcattacaacgagcagcacccccacagtgcgttaccgcccaccgagagagttcaggcgcagaatggggttatcaaccaaaggggtgtccgtgtccggagacccagggaaaatccactcagtcgggctcacgggcgccctctaaagcgcgatgcatggcttggcaaaccgtaaacatcctcgttgtattaggctctggggcggcctcggcctgagcggcttcagaagaatggagatagagctcgcggaaagcgccggcagcccgcaccaccaaggcacagattaacatcgctcgttagcaagcaacccttccaggtaccgtgcgagtttacgttgggcgaattggagcagattcgtcattgaagcagtccgtgcacccgcctgagacaggcgggtgcacaatacatcaatgctcatgtggtttcgaaactctcagatctgggacagtgacggcaaccacctcggtagccaggatcttgtgactcgggtcagccagctcgagccgaagcttgtgcggccccggcgtgagcccgacgacgatgatcgggtcttcactcgtatgtgcccaagtgccacgaacgtcgtccgttgttacgtgcaaatgcccgatgcgtggcgagatatcaactgcctgcttgccaaatacgggcatgacgcggaagttctccgtccggaattggacgatgactacaccgcgcgcaagcggctcggcaagtgccgggtacgctatcagcttaggcgctggctcgccgttgagtggaagaatggcaggtggccgaacagcatcctgtgctgtttgcgcggatgcgcttatacagaatgtcgccgcaatggcgaccgccgaaaagtacttcaggttgtggcgcatgacattgtcctttttcatagatgggctgcctcgatacgcgggccaggcagagcgatcgcgaggatagtctccacatttcatcacacgccaaccgcccgttgtggtgatgttgtatgggcaagtatcgcttgccgttcctgatacatagcaatacacagccgcaatcactggcgatcatcgaccatctcgatcgcaaatggcctgtgccggctgattcccgccgatggtcctgctcgcatacgtgtactggagttcgcgctgaccatcgcctgtgacttgcacccgttgaacaatatgcgcgtgcagaagtatctcagtgcccgccttggtgttgccgacgctgacaaagccgaatgggtcgcacactggctcacggccggcttcggcgccttggagccgtggctgcccgcggacggtggctggtgtgtcggcaacgcgcccaccctggccgactgctgcctggttccgcaagtcgccaatgcgcagcgtgcggcgttcagcctcgcccctttcccccgcgtgcgccgtgcctacgaacactgcgctgttgtcgaagccacggtgcaacgtgcccggccagtgatcctgaccgcgctggcggctatcctggcctttattccgttgacgcattcagtcttctggggaacgctggcttacacgctgatcggcggcaccttcgccggcacggtgctgacgctggtgttcctgccagcgatgtatgccatctggtaccggatcacgatgcctgccgatgcgaacgagatgacgcccgcggatttgaacgacagcggcgcgaacacgcccgcggccaccacttgatccgacaggccgcggccgtcagcgcgaggccgcggccggttggtggcgacaaaaagcagtgtgggcgctacccccacaactgcatgcgaggcgccggggcgccgttacccattgaccgatattccacatgcgccgctggtatctgccggcgcctcccgtacggacttggaacgttcgaccctcaggtcatcgggcaagcggacgcggttgcgcgctgccaccacctcggcaaggatcgaaatggcgatttccggcggcgtacggctgccgatatagatgccggccgggccatgcatacgggccagttgctggctggtcaggtcgaattccttcaagcgttcgcgccgcgcctggttgttgcgacgcgagcccagcgcaccgacgtagaaggcccgggtgcgcagcgcctccatcagcgcaaggtcgtcgagcttggggtcgtgtgtcagcgcaaccaccgcactgcgttcgtccaaggccatctccaccaccgtgtcatccggcatggtgcgcaccatggcaatgccgggaacggcccaggactcggtatattcttcgcgcggatcgcacaccgtcacatcgaagccgagcccgacggcgatctcgcagagatacttcgaaagctgcccggcgccaatcaccagcatgcgatagcgtggcccatggatggttgacagcgacttgccgtcaaaggtcaggccgtcagcggccgccgccggcccaagcgtcgcaatgccggtggcgatatcgagcgtacgtgtcaccagtcggccgccctccaccgcctgcagcagttcgcgcaatccgctcgccgcagataccggctccgccaccaattcgatggttccgccacagggtaagccaaaccggtgtgcttcctcggcgctgacgccgtaccggatcacctcgggactaccgcagcgaatgccttcgcggcgggttcggtcaatgatgtcgtcctcaatgcagccgcccgacaccgaacccactaccaggctgtcgtcgcgcacggccagcatcgcgccggccggccgtggcgacgaaccccaggtatggacgaccgtcaacaacaggcaacggtgtccttgctcgtcccagcgaacactgcttctcaagacttcgagatccacgctttccatgattcttcctgccgtccagcctgcatccgctgccccgggtcaagcgtagcaagctgaggtccagtcaataacccggggccaggcgccagatcacgcttcgctggcaacggttgcttgctccgacggcttcgccgcgcccgcccttcccttcgcggcgaccgcgatggccgcaagcaaggatggcacggcgaggatgctgaggatcgagctcatgcccaggccaaattgcagcagcgtgccaccggaaacggctccgaggacaccaccgaaacgccccattccaagcatccaacctaccccgcaggcacggccctgggtcggatagaacgaagccgccagcgcgggcatggataccaggccggcccccatgaacagcccggcgatcggcgtcagcagcaccaggtatgcaccactggtcgcgtgtcccatcgccagcgtgaatacggcggtgaagaaataggcgaagccgatgacgcaatggggattgatgcgatccatcagccagccgcaagccatggcgcccagcgtgccgccgagcgggaacagcgcagcgatcaaagaggcctcggccagggtcgcaccggcttccctgacaagggtcggcatccagctggtgaccaggtagaagactagtacacccatgaaataggtggtccagagcatgaacgttcccatccgatactctggcgacaggatgagcccgagcggcgagcgcaacttgtcggcctgatcatccggcaaggtaaaccgcgacgcgtggacttccgcggaacctgccagcagtctcaacaccgttttgatcttctgcgccggccaatcgcgcagcaccatgaaccggatcgattccggcagtgcaagtgcaatgatggcaaggaccagggggactattccgccgacgatgaacacgctgcgccatccgaaagcgggaatgatgaccgccgccaggaagccaccgcccgcggcgccaagcgtaaagccgcaaaacatgctgttcaccaggaaggcccgacgcctggcgggggcatactcggccagcagcgtggtcgcgttgggaatcgcggcgcctagccccatacccgtcaggaagcgccagcaggacagctctgcagcggatatagcggacgcagtggcgaggctgaacagaccaaaggccgccaccgatacgatgagcacaggcttgcgtccgaaccggtccgcacagggtccggcgaccagcgcgccgagcgcaaggccaaccagcgaagcgctcagcacattgcccagcaccagcttcgaaacgccccactccgtggtcaacgatggcgccacatagccgatcgcagccgtgtcgaagccatccgccgccaccaccagaaagcaaacgatgaggagcatccattgatagggcgagaatctctggttgtcgatgaatgcctggacatctatggtccccggcgagctggattgctgtggtttcatgcgctttgtctccattatctgagcacgtggctccatgtcgttgatggtcttctctgctcgtgaaccttgcgcgccgccctcgcgttcctctccctccctttcaaggcagcgcccatgaaatgatggtcgtcatatcacatggcgaacggccgcagtggccatgacgctcccatgccgctcccagtcaagcgtttgccacacccaccgatatatccagcgtctacatgctagtcaggcggaccggcatggtcaaggaggaacacgctgctgctgccttggtgctatccctagtgaaccgcgtggcgcgcgcccgcccattggcccccacatgtaacgacgcgaccaacaaccccgcggcaagcccctgatgcaatgatgatcgtaatgttatatattgcagagacacacacgcccgactcttcctgtcacctgatcatgcgctactcactcgaccaaaaggctgaaacccacaagcacatcgtcaaggctgcctcgacgcaattccgcaagcacggtgtcaacggcatcggcgtagcccagttgatgaagagcgccggcctgacccatggggggttttacgcgcacttcgagtccaaggacgccctggttgccgaggccatcgacgcagctttcgaccagaccatggaactcctgcaagaagcgacgtcggtggcatcgcctaggcagcgccggcaagccgtcgtgcaggcgtatgtgaacaaaaggcaccgcgaccatcccggatcgggttgcgccatcgcggcgctcggtgccgatgtgtcgcgcctggataccaagacgcggcggcgcttcgaggcgcgcgtgacatcgctcatcgaagccattgcagggggcgatgatgagacagcacgcaaggacgccattgtcacgctggcggccatggtcggcggcatggtgctggcgcgctccgtgcgctcggaagcgctatccaccgagatactggacgcactccagacgtccctgtagtgcggccgcccttgcaccagcgccggagccgatatgagccaatcccgctttctcaagatgccatgtcccgttgcacatgcctcggcggtgctgggcgagcgctgggtcatcctaatcctgcgtgaagcgtattacggggcgacgcgattcgaggagttcgagcgccagctcggcattgcttccaacatcctgagcgccaggcttcaggcaatgaccgatcatggcctgctgatacgcaggccgatcgaaggcagcacacgctgcgcctacttcctgagcgacagcgcacgcgatttcctgccgacctacctgagcctcaaggcgtgggcagagcgatgggtggcggaaccgaagcggcgcgccaagcttttcgtggacaagcacacgggaaacgagatcgtggcgccaccattgacgcgccccgatggatcgccgatccccttcgaagacgtccaggtcatcgacgcccaggtgcggtagctgccagttgccgtccgcgggtcaccggatgggttagcgctaatatggaggcctgacgacatcgcgacccgccatttcatgaccacctccaccacgcgcccggcccgccaaagctatcaccatggcaacctgcgggaagaaatgatccgctgtggccgggaaatcctggccatcaagggcgtccatggactgacccttcgctccgccgcaaagctggccggggtctcgcacggcgcgccgcgcaatcagtttgccgacaaggagggcctgcttgccgccatcgccgccgaaggattccgtgaactggtcgcggtgcggcgggcccggctctcgccggagatgagcgccgaggcgcggctgctcacgatcatggacggctatatcgagttcgccgtcaagcatcccgcgcttttctacctgatgttcgggccgcagatcgaggacaaggagaggtaccccgaactgctggaggcgggcagcgcgtcttaccagctcctgtcgggtgcagtccaggactatttccgggaaaacaatcttgccgagcagttcgacgacatgatggtgcgctgcgcgtggtcggctatgcacggtgtgagcatgttcttcagtgccaagccgaccggacccagcccgcgcccacgcgtcgcgctggcccaatggcggcagagcgtacagcaattcgtgctgaccggcctgttggcagcaggccagaacaaggccgcggcggccggtgccgccgcaagcaagccgaaggcgaggtcacgcagcgcagcgtaggcgtaagcctcccccggagtttcagtctccgcggcgcggctccagcgcatcgaccagcgcccgcttcagcatcacccggccaagctgcaaccggtatgccccatcggcgaagttgtcctccagcggcgtcacgttggtgaacgcggcttcgacaatggcatcgaccttgtccggcaggtcggcgaagctgccttccagcaaagcccccgcctcccaggcgcggaatgccgcatccgcaacgccagtgatggcaatccgtccccagctatagccatctttggcaacgttgatggcaacggccgccgcagccaccgcatagcccgacgacggatgacggaacttgcggtatgcaacccggcccggtgccggcaatggcacatggatgcgcgtaaggacctcgtccggctcaacggctgtggacatgaagccggcaaagaactcgtgcgcgggaatgcgcctgctgccttgcccgcctgccacttccatttcggcatccatcgcaagcgcgaccgccggccagtcggccgacggatcggcgtgcaccagcgcgccaccgatcgtgccacggttcctgactgtcgggtcggcaatcaccgtggcggcgagtgggaacagcggggccagccgcttcagttccgcgctcgcctccagttcggcgtgggtcgtggcgctgccgatggaaacggagtcctcatggaccacgatgccacgaagttcaggcaggcgaccgatatccaccagcagtccaggcctcgccagcctcagcttcatcatcggcaatagcgtatgccccccggccaggatcttcgcctcggggttttgggcaaggatggaaagtgcctgttgcacactgctcgccctgaggtattcgacttcgtacggaatcatgtcgcgctccggctctcttggatggctcgccagactttcggcggcgtcagcggcatatcgagatgggatatgccaaatggcttcagtgcatcgcataccgccgcgacgaccgcgggcggcgcaccgacgcagcccgcctccccgatgcctttgacgccgagcggattcgacggcgccggagagacatgaaagccggtgcgcatgcgggggatctgttcgatacgcggaaagccgtagtcaagcagcgagccggacagcagttgcccggagtcgtcgtacacggcttcttcgaacagggcctggccgatgccctgtgcgatgccaccgtgcatctggccatggcaaagcatcgggttgatcatcacgcccacgtcgtcgactgccacatagtccaggatcgtcaccaccccggtctccgcatcgacctccacgaccacggcatggcagccattcggcgctcccagggcggccggctcatagaagacgcgctcatccagccctgcttcgaaatcccggggcagcttgtgcgcaaggtatgccatccttgcgacctgcgagaacgggatgacggtcggatttgccgtgctcgagaaatggccatctgcatagtgcacgtcctcttccgggatttcgagcatgaaggcggcgatccgacttgccctggcgagaatcttgcccgctgccacataggcagcgctgccgcctacgggcatggagcgtgaattgaacgtgccatgacccgccagcacgcggtcggtgtcaccctgcacgacatcgatatcttccatcggcagttgcaaggcttccgcaacgatctgcgcgaagctggtggcatggccgtggccttgcggcatcgagccgctgaacagcgtgaccttgccgtcggaatgcacgcggatatgcgcgctctcccagccgccgcggttgaacccgaccttttccagcatcggcgaaatgcccatgccgaccagctccagatagcaggtcaccccgatgccgatgtatttgccctgttcgcgcagcgccacctgctcctcacgccagcgccggtagccgatcagctcggtcgccttgttcaggcaggcttcgtagtcgccggagtcccatttgccgcgcgcgccgtcatgcggcaaatagggaaactgatcgggctgcaccaggttgcggcgccgcaactcgaccggatccatgtccagctcccccgctacagcgtccatcagccgctcgatgatgtatgcggcttctggccgtccggcgccgcgataggcatcaaccggcgtggtattggttgtcaccagattcacttccgcgtcgactgacgttatctggtagttgcccgtgatgtagttgaccgtattgatggtagggatccccgtcgccatattcgacaggtaggcgccgaggttggcgaacgaccgcaagcggatccccagcactttgccgtcgttggtgacgggcgcctccacatactcggtatgcgcgcggccatgggtggtcgcgacgaagttctcgctgcgcgtctccgtccagctcaccggaagcccgaaatgcctggaggcgaacgccaccagcacctcttccgcatagaagtgcatctttgcgccgaatccgccaccgatatcgggcgccacgatccggacccggtgctcgggccagcgcagggtctccgccagccagcgtctcgacatatgcggaacctgggtcgggacgataaacgtcaggcgctcgtcgaccgggtcgaagctcgcgcacaaggcgcgcggttcgagcgggcttggaatcagccgctggttgaccagccggatcgagactacccggtcggcccgtttcaatgcatcctcgtagctgccgcccttgagccggaatacgccgatgcgattgccgggcacgttatcgtgaagctggggcgcggtgtctgacagtgctgcttccgcatcgacgacaggtggcaacgcttcgtaaccgactgcgaccagttccgcagcgtccgcggcaatctcgcgggtctgggccaccaccatcgccacggcttcccctacgtaccgcacccgcccggccgcaagcggagggtgcggcggcaccttcgaattacccacgacccagttcggccggatgtcgccaaccttgccctggatgtccgcataggtcagaaccccgatcacgccgggaagcgcgcgtgcggccgagctatcgatctcgctgacaacggcatgggcatagggcgacctgacgaaggccgcgaagaccatgcccgggaactggtggtcatccgtaaacctgccctggccgctcatcagccgcttgtcctcacgacgcctgaccgatttgccaatgtacttcgttgcacttccgctcagtgcttcgctcatctcaggcctcctcatgtgtgacggacggcgttcgctgcagcctggtcacggcaagaagaacagcatcgacgatgttctgatacccggtgcagcggcacaggttgccgtgcagcgcttccctgacatcgctttcggccggcgcaggctggtgcgcaagcagcgctcgtgccgcaagcagcattcctggcgtacagaagccacactgcaagccatgaagttcgttgaaggcttgcttgagcacggctgtcgtgtggtcgtgctccatgccttcaatcgtgtgaagctcgcagccgtcagtctgggcggcaagtacggtgcacgacttcacgttcgtcccgtcgacaagcaccgtgcaggctccgcactgggaggtgtcgcaaccgatgtgaacgccggtcaggcgtttctggtcccgcaacaagtgcaccagcagccgccttggctctatctcggtggtacctgttacgccattgatggtgttttcaattttcacagtcgcctctgtgtctccgttagcaccttcagcatcggcacccgtggtgcctatagtattacgatcgtcatactaaaggggcaaaaaaaattccggtgttcttcccagaaccgccgagctcattcagcggaagttgccagcgaaccacccggacttgcctcctggcttaccagcttttcaaagcgggaaaagaactccgccaggaacttgttcgccactgatcccaccagacgggacccgatctgtgcgagctttcctcccatctgcgctgcggccacgtagtgcagggaagtgccgccctcgacgtcttccagacggatatcggcgcccagcttgccgaatcccgcgacgccaccgctgccgctgccttcgatgtgatagccgatgccctcctggtggccggtaaatcgggccgtgcccttgaagcgtgccttgatcggtccgacggccgctacgatgactgcgtcatagtctccgtcatctccctgctggtattgctcacatcccggcaaacaccgctggaatgtcgccggatcgttcaaccgtttccagacctctgccctggaagccttgattacctgtgcgccagtgaattccaatgttttcccctttcggtttctgctacttccgtcacagcggccggcccggaaccgcgaacgtctgcgccgcttcgtcaccgcatggccgaacgccaatctatccagcgtctatatcgtagggagcgcgtcggcgagcgtcaaggaacgggaagccatttacgcctagtggtaaccctagcaacgaaagccctttcgctcatctggctggcactgcagtgcccgtaaaggaacaggctggtaaacccgaaactgcccaaagacttcttgacgcggccaagaccgcaatcctaggatgtagacagtggatacaccgagcaccagcgccgaacgcgactagcgcagcaaggcaggccaggcgtccagccctttcaaccctgcccaccttcgttccagtccccggcgcacgccccaatgtatccactgtctatattcgatacggccgacttcgaacgccggccccatccacgccaaaggagaacccatgtctcgtgcagtgatcgtttcatttgcccgcaccccgatcggcaaagccacccgaggcgccttcaacatgacccatggcgccaccatggcgggccatgccattcagcatgccgtccagcgtgcggggattgacggcgcggaagtcgaggacatcatcttcggctgcggccagcccatcgccgccaccggtggcaacgtcgcccggcaaggcggcatccgcgcgggcctgccggtgtccgtcagcggcacgacgctgacccgcttctgcgcatccggcttgcaggcagtcgcctttgccgcacagcgtgtgctgatcgacaaggtgccggtaatggtggcgggtggcgtcgaatcgatcagcctgtcacaaccggtcacgctgaaggttgcccagcaggaagcgtggctggccaagaatcgccccgatgtttacctgcacatgatcgatacggccgaaatcctcgccgagcgctacggcatgtcgcggcagcgctccgacgcgttcgcgctgcgcagccagcaacttactgtggcagctcagaaggccggccgcttcgcggaggaaatcgttccgctggcaacggtcaagtcggtgaaggacaaggtgaccggagagacgtcgacggcggagttcctgctcgaggcggacgaaggtgtccgtgccgacaccacgctggaaggactgagcgttctgcctgccgtgaagggcgagggttaccaggtgacggccggcaattcgagccagttgtctgacggggccgcggcgctggtggtgatgtccgaacgcgaggccgaacggcgtggcctggaaccgctgggctacttcgtcagcctggccaccgctggggtggagccggacgaaatgggcgtcggcccggtccgcgcagtcccgcgcctgctcgaacgcaacgagctttccatcgatgacatcgacctgtgggaactcaacgaagcctttgcctgccaggcgctgtattgcattgaccagcttggcttgccgctggagcgcgtcaacgtcaacggcggcgcgattgccgtcggtcacccgtatggcatgacgggcgcgcgccaggccggccacatcttgctggaaggacgtcgccggaaagccaagtatggcgtcgtgaccatgtgtgccgccggcggcatgggcgcggcaggcctgttcgagttcatccactaagcatccaagagagacaacggagacaccgatgaccgacatcaccgaatacgacaccgtgtttatcgaccgcgacggtccctgcgccgtcgtcaccatgaaccggctggaaaagtacaacgcgctcaacaccgggttgcgcaccgacctttacgcggcgctgtcgtcgctgatgaccgagcggacggtccgagggatcgttctctggggtggcaccaaggccttcgtggccggcggcgatatccctgaaatgctggcgcgccgtccgattgaagccttcgtcccgaccagcggcgcgcccgacctgtgggcgctgatccaccacagcaccatccccgtgatcgccgccattgccgggccttgctttggcggtggcctcgagcttgcgatggcgtgcgacctgcgcgtggctgcggacaacgccctgctcgggcagaccgaaaccaacgttggcctgataccgggacgcgggggtacccagcggctaacccggctggttggcgcgacgcgcgccaaggaaatgatctttaccggcgaaatcatcaagccggacgaggcttaccgcatcggccttgtcaacaaggtggtgcctgcgggcgaattgctggcagaggcgaaggcctatgtgcaccgtattgccgagaagtccccgcactcgatcgcgatggccaagctgatgatcaacaacggccaggatgccacgctcgatatggcgctgatgctggaacagctggcctttgccacgctcttcagcacggaagacatgcacgaaggcggcgcagcgttcctcgacaagcgccgtccggtctaccgcggagtctgaccatgacccagctcaacacacgtgtgcaggctgcgaccaccctcgcgcaaccagacccctaccgcccccggctgacagtgaccgcgcttgccgatatccggcgcttcgagcagacaccgctttcggaccggcgcctgcccgacagcacttacgagttgctgcgcctggcgcgcgatcgtgcgcccgaggcgccggcgctgcattacttcacctccggcgacgagttggccaggtcggtcaccatcacccatgcgcagatgttcggacgcatcacgcaaaccgccaacctgctgcactcgcttggcctggggccggatgacgtcatcggggtgctgatgcccgtgacgccagagtcccagtacgcgatctggggcagcgaagcgaccggcatcgcctgcccggtcaactggatgctggagcccgagattatcgcggcgttgctgcgcaatgccggagccaaggcggtgatcgcctatggccccgacccggatatcgaagcctggaacaaggccatgctggtgcggcgtgaactgcatgacgtgaagcactggatcaaggccggcggcggtaaggcaagcgaggaaggcatcttcgacctcgacgccagcgttgaccgtttcgatgacgaggcgcttgacagcggacgggtgttctcgccgcaggatacggcttcgatgttccataccgggggcaccaccggcacgcccaagctggcgctgcacacgcatggcaacgaagtgtcgatggcatgggtcagcgccatgcagatcgacgtgcagcccgaggacgtacgcgtctgcggggtgccgatgttccacgtgacaggggtgctgaccaattgcctgatgccgctggcccgcggcgcatcggtggtgctgctgacgtccagcggctggcgtgatccctcggtgatccgcaatctttggcagatcgtcgatcacttcggggtcaccgcgctgggcatggtccccagcgtggtcaacatggcgctgaatattccgatcggcgacgccgacatcagctccctcaaggcggccagctgcggtacggcgccgctgtcggtggccgtcgccgaggcgttcgagcaaaagaccggcgcgatgatcttcgagggatatgggctgactgaaggcaccgcgctcagtgcaaccaacccgcgctatggccagcggcgcatcggctccatcggcctgcccatggcctaccaggagatgaaggtcgtcaaggtcgccgctggacacatccagcgcgaatgcgagccgggcgaacctggcatcgtggtggtgcgcggtcccaatgtcttctccggctacctgaatcccgagcagaacaagagcatctggttcgaaggcggctggttcaatactggcgacctgggctatgtggacgaggatggctacttctggctgaccggccgggccaaggacctgatcatccgcggcggcaacaatatcgatccgcgcatgatcgaagaggcgctgtatcggcaccccgaggtattcgatgccgccgcggtcggcctgcctgacgcgcatgccggtgaactgccggtcgcgtacatcgcgctcaagccgggcagcaccttcccgctcggccgcatcaagcactacgcctacgaggtgatcccggaacgcgccgccgtgcccaagcagttctacctggtcgacgccatccccaagactgccgtcggcaagatccagaagaacacgctgcgcagcgacgcagtactgcgggcgcagcggcagatgcttgccgaggtcaacgcggatacgccggtgcccctggttgatatccgcatcgaagaccggggcgaccagggcatcctgtccacgctggtgctgcccgccaccctgagcaacgaagaccgggagatcgcggtggcaaccatcggcaaggcgttctcgacgctgaccatcaaatacgcggtggtctacgaatagcccgttcaccgaagcagggcctcgccagaggcagtgctggccggcagcgcctcaccccgacgtatccgtcaccacgggtatgagctgccggattgcagaaccaataatggagacaaccatgactatccagctttcgcgccggcgcctgctgcaggcggcgtgcggcgccgtgccggcaatgcttgtgccgtccttgctgcgggctgaagcgccctatccgggcaacccgatcgtcgtcaaggtcgcatttcccgctgggggtccggcggacgaatcgatccgcgcggcagccgtcgtgatgaaaaggagcctggggcagaacgttcttgccgacaaccttcccggcgcaagcggatcgatctgcgccatgaacgtgctgcgcggtgccaacgatggctacaccttgctgggcacgaccggcatcgacttcctggtcgcgccacttaccatcgcatcggcgaagtattcgccggagaagttcaggctggcaggcttcagcgggatttcggacttcatcctggtgtcgaatccctcgttgcagttcaagaacgtcgacgaagtcattgcctacgcgaagaacccgaagaaccgcccgctgtcgctggcgcattggggccctggctcgggaccccacctggtcggggccgacttccaggcccgcaccggcgcacgcttcctggaagtcccctacaagggcgcggcgccggtcaccagcgacattgccggtgcgcaggtagacctgaccttcattcccatgggaggtccgacttacgggatgatcaaggccggccgcttccggccgatcggtgtcgccagcaaggcccggcatccgtcgttgcccgatgtgccggcgctgtcggaatacaaggacctggccgacttcgagtacagccagtgggcgggcgtgctggccccgccgaatacaccggatgccgtgacggcacgggtggtggaggccatgaatgcgtgggtgggcagcccggaaaaccgtacccggcgcgccgtcaatctccagcgcgcgatcgagccgatgaccatggcccaggcgcaagccttcctgagcaacgaacacgccaagctgacccgcattgccaagagcctcaggctggccgggcaataagacccggtggtaatgcggtcagcccgcctgtgccgcggctatgccggatcgccgcggcgcaagctggcaaaatccgcaggacgtttccccaggaaagcggcaatgccctccgcggcttcggcgctgccctgggccacggccatcgcgccccgttcagcctcgagttgctcatcgagcgagcgctcgtgcgcatggcggcacagcgccttgattgatcccagcgcctgctgcgggccctgggcaagccgcgccgccagcgcgatcgccgccgcgccggcctggcccgccttaaccagttgattgacgacgccgaagtgctgcagctgctcggccgtgatgcggtcgccagtcaacgccaactgcgtcagcacctgccgcgagaggctctgcgccagcaggccggtgatgccgccatccggtgtcagccccaccttcacataggcaatcgagaacgctgtgccggcggaagccaccagcaaatcgcaggctagtgccagcgagaagcccgcacctgccgcaccgccttcgaccgctgcgacgatcggcttgggaaagtcgcgcagcttgcacaccacgtcgtgcagatgccccagcttctcgatgcgctcctcgtaggtcagttcgcgccgcttgctgatcaattccaggtcgccgcccgcacagaaatagtcgccggcccccgtcagcacgatcgcgccaatcgccggatcctctgctgcattggccagtgcggcgcggatattgtcatagagatccgccgcgatggcgttgcgtttgcccggattgttgatggcaaggaccagcacgctgccttccgtgcgctgcaacagggaggaaaaggtagtcatgtcgtgattggtgatttccatgaatgggcgaaggctgctcaaccagccgtctggtgcgcagcgcgctggcgctgatagacctgcaggtggcaatatgccgcacggctcaacggaagctcatgcccgtacccggctgcgcgcttgatgagatcgccgacgatggcgtcggcttctatgcgtggggcgccccgcgctatatcccgcatcatcgaggcagcccaggtcgatgcttcgtccagcagtcgggcctgcatggcagcgacaacgggttcagggatggcatggccgtacagttgcgccaccgtgcggcactccgcaatcgcgtcaagcatcaggcgacggccatcctgggtcttcatgatgtccgccacggtcccgcgcatcaggcatgtcatcactgcgccggcggcaatcatggcccacttgttccacagctcctgcccgatggcgcccgatagctcacgcgtaccggccgccctggacaccagcgcatggaaatccgcggccaatgccgacccctgcgcggcgcgcgggccgactaccagccggtccatgcggccggcgtgcacgacggttccatccgccgccagcgttgtcgctatgtatgcgactccacccagcacgcgttgcctgccaaagcactggtcgagccggtcataggcgtcaaggccgttgagcagaggcaataccgcagtgtcccggccaacggccgggctgatggcccggatcgcgtcggcaaggtcgtaggccttgcatgccagcagtaccacgtcgaactgcgcgccgacctgaccggccaggaccatctttaccgggcgatggaagtcgccaagttcgctacgcacggccaggccaacccgttccagcgcccgcgcgcggccgggccgcaacatgaaggtgacatccgcgcctgcctcgatcaggcgcgcgccatagtagccgcccatgcccccggcaccgagtacaagaatcttcatgacgcctctgcctgcgcggcggctgcggggcggcactggacgatcaggttgccggtgaaaacctgcactggctcgtcggcctggttgaaggttgtggtacgcaccttcaccacgccctggtcggggcgcgatttcgaaatccgcacttcaagtatctcgctctcgatatgcagttcatcgccagggcgaaccggccttggccagcgcagctcctcgaagcccgcgccgacgatgccgcccgcgggccggaattcgccgtcgaccagcaggcgcatcgtcagcgcagcggtatgccaaccgctcgcagccagtccacgaaatagtgtgtcgcgggcggcggcttcatcgagatggaagggctgcgggtcgaactcggcagcaaaggccttgatccgttcaggcgcgacggtcagccgccccgaaccgtatcgttggcccgccgcgagatcctcgatgtattgaatgttcattttctcctccagatggtttgtgctgaactttgcatcaatgcatgcccgctacgagaacagacggatcaggccagcgtctcgagcgccagcgcaatcccttgtccgccgccgatgcacagcgtgacgatgccgcgccgtatgccgtcggcgcgcatggcatgcagcagccgcgtcgtcagcaccgcgccggtcgcaccgatcggatggccgtgggcaatggcgccaccgtcgacgttgatgatgtcgtgcggcaatccgagctccaccgcgacagccagcggcaccgcggcaaatgcttcattgatctcgatgcgttcaatgtcgcccagctcccagccggcgcgttgcagcgcctgccgcaccgccgggaccgggcccagcccgaacatgccgggctccacggccccgacaccgtaagcggccaatcgtcccaacggctgcagccccctggcttcagccagcgcacgttcggcaatgatcatggccgctgcgccgctgttgagcccgggcgcattgccggcggtaatcgtgccgtccgggcgaaacgccggcttgagccggccgagcgtatcgaggctggtatcagggcggttggcttcgtccacttcgaacatggccgtaccgcccttccctttggtcgccaccccggcaatctggccggtgaatcgcccgttcgcctgcgccagcgcgaaattccgctgcgaacgctcggcccagcggtcttgggcctcgcgggtcagcgcgtagcgggcgacaaggtcctcggtatgccatccggagtgctcaccggagaaggcgtcaaacaggccgtcgtgcagcatgctgtcgtacaggacggaatcgcccatgcgttgaccccagcggccggacggcatcaggtatggcgcgcgatccatgttttccatgccgccggcgatggcgatatctacatagccgagccgtacctcgtccgctgccgtggcgatggcctgggcccccgagccgcaaacgcggttgacggtcatcgccggaaccgaaaccggcagccctgccccaatggcagcctgccgggccgggttcatgcggttgccggcctggatcacatttccgaacaccacgctgccgacctcgcctggatcgattcccgcccgtgccacggttgcccgtatcgctgcggcgccgagatcaaccgccggaacggccttcagtgagccgttgtaggcgccaatggcggtgcgcaccggctggcacagcacgacatctcttgcatgcatcgcattctccctaccaaacaatcagtttcaatcggccgcacgcactccatgcggtatgcgcccggtagccgggtcttgaaggttgcaacaagaattggctgcgcgggaaatccggctcaggcttccgccgagcgcgacaaccgctggcgcacgcggtcactggcggcggggccgggtgcaaggtgatagtcggcatcggtgaccgggcgcccgttggcggcgtcgaccagcacaggttccacgcgcacgccggtgcgccggttcgtcaactgcacgctttcgccttcaggcgcgagatgcttgttgccccaggccagcatcgccagcagcacctggcggaaatcgcgcccgcgcgcggtcaggatgtactcggagcggggcgggcggtcgcagtactggcgacgctcaagcatgccttcttcgacaagcgagttcaggcgacgcgtgagcatattgggcgcgatagccaggttttgctggaactcgtcgaaccgggtcacgccgtaaaaggcttcgcgcaggatcaatacgctccagctgtcggcgacgcgggccgcggtgcgagcaatcggacacggcgtttcgccaagtggcttcttctgcatgattggcttccttgagagactgcttgctatcgatatgaaagtcagtctagggtagtcactatcatcatgcaagttcgtttttcgcttgtgctgtattcgtcgctgttgaagaggtgtgagcaatgccgcaagaccacccaacgcggagaaggccatcggaatgaaggtcagcccggccgcgtacgattttacgtcgttgttgaccggcaaaatccgtaacgttgccaagcactatgtcggcggctacatgagctacgaagtcacgccgctgctcaagtggcaaagctagcgttcggcaatctcgagaactagccaccgctcaaactcccggatcgtcaaggaggctttcgtccacgggcaagccgtccggattggtgtgatagaacgcatccacgtgcgtcgcgatatggtcgatcgtagcgatgaacgtcgtggcgaacgtcatcttgtcttccggcacgaccaagccaaaggactgtgtcttttgatgcgtcagatgcggcgtgacgatcggacgctggaacagcttgtgcgccggcatgttgtcagacagcgtcaggtcaacgatacgttgtggcatttcccttctcctttcttactctcagtgaaaacacgtgaattcctcttaccgaccggtcggccgatacagcggtgattcgacaatccaataggaccaatagggcgacagacttcaagctgcctttcccaggtatgcctccatcaccgccgggtttccggcaagttgtgccgacggaccactcatggtgatgcgaccgttctccatcacgtaagcacgagtggttacggaaagtgcctgcacggccagttgttcgacgagcagaattgccaagccctgccggttcaactctttcaagaccggaaatagaaaatcgaggaccttgggcgctagaccgagagatacttcgtcgatcatcaacaacctgggcttggacaatagcccccgaccaatcgcaagcatttgctgctcgccacccgagagggaacctgcagcttgcaatcgccgttccttcaagcgtgaaaagaggtcgtagatcctgtcgatatctccccgcagggacgcgacgccctttcgctgagcgtgtatgtagccaccgaggatgagattgtcttccacggtctgatccgcgaaaacgtaacgcccctctggtaccatcgcgattccgcacgcaaccatttcgtgcggaccacggccatgcacctgcttccctgcataagtaatggcgccggcaaccggcttcacgacccccgcgatggccttgagagttgagctctttccagcgccatttgatccgatgatgctgacgaactcgccctcgtgaacttcgagggaaaccgcacgtgccgcttcgatccgtccatagttcacggatacgccatcaagtttcaataaggggttgctcatgaccgcacctccagcgcaggctcaggatcttcctgtgacttgcttgagccaaaataggcttcaatcacggcaggattgtttcggacttcggccaccggccccgacgcgattacttttccgtaatccaggacggtcacatggtccgaaacagccatgatcatgtccacatggtgctcgacaagaatcatcgtcatgtgacgtgcggcaaggtcccggatcagtccactgaggctttcgatttcgccgtgcgtaaggcccgctgcaggctcgtatcatggccacgctgaccattcgaaacattgaccacgagctgaaagcacgcctgcgcatcgaagccgcgcagcacggccgctccatggaggaagaggtgcgcgagattctgcggcgcgcgctcaacaagcgaccgggcccccgggcggcctgggaagccggttgcatcagcgatttgtaacactagccgatccggggttggatcttcccttgcgcgtggagcgaccgcggtcggcggatttgcctgaatgatcgtcctcgacaccaatgtcctgtcggagctcatgcgggcctaggcggagccagccgtcgtcgattggctggaccggcaggaacaagaatcgctagccataaccgccgtgacggttgccgaactcttgtatggaatagcgcgtttgccggacgggcgccgcaaaaccggactagaggaagccgcgctgcagatgctcgatgaggaattcgccggccgggtgcttcctttcgacgaggacgccgccgttcactacgccgcgctcgtatcccggcgagagcacgcgggtcgtccgattagcatggcggatgcgcagattgcagctatttgcctgcaccacgccgccgcgctggccacgcgtaacagcaaagacttcgaaggagtcggcatcgttctggccaatccctgggaaacgagccaaggcaagctcgcgcccccctgcgtgcgccaggcgctggctatccttaacgagtgttcgcgtggctgaccgaagccggctacctggccggcaatccgctcgcgctcgctcgccggggcgcccccgacccggccgcggatcacgcgctacctgagccacgacctgtggaacgcggtcagggctgagatcgaagcgatgccggtcgcagccgcgcgcgaacgcatcacggctttgtcgccgtgacgcttgtcatgtcgttgctgctggcctggtaggtgagcgtgccggtgatgttggtcacggcgaaggtcacgctgttctttcgcttggagatcgttccgctcgtgaccatgcactgtccgccggcgcccgtggtgcaggccgagctcccgctgtagccgccgctccaggttccgctcacggttgcgttcggcaccgggttgtggctggcatcgtgcaccgtgaccgtgacggtggtggtccatcccgtcttgtttccggtgctgctggcgctcaggccgcccacgtgcaccacgggcagactcgcgatgccggctcgagggccgctcgacaggtccagggcgaagctgccgcccttgcccaggttcacgctgtcctcggacggggacacctggatagtgtacgtcccggccacggttggcagtgcgtgcagtgtttcctgacggccgatgccaccgcattcgacgccggccatgcacaggctctcggacagcacgacgccgttggggtccagcagccgggcgtcgagatcgggatcccactgcgcggcgaagcagccgcccaatagcggcaggatgcatttcgcctggccgttaatggtgaccgtggcaccgatgggaacaccgaggtcagcctgggcgatggagaacgtgtagctccactgaccatgattggccacgctgccggtgaccctgcgatacgtcggaaagacggtcggctggtagctggtgccccccttggcgctggccaccagcgcgtagccgtcaaggagtccggcgccgatatcattgtccttgccggcggggccgcggtcctgcgccgtgacttcgagcttctgccgcaggtccgctggcgacaggatcggattcgcctgtagcgccagggcgactatgccggagacgaacggcgtggccatggaggtgccactgtaggttacataaccgctgaccgtgccggcctttgcagccgtgatggtcagtccgggtgcacagatgtccggcttgacacggttatccagcgtcggtccccggctcgaaaacggcgtcacgtagatgccgtccgaatggttgggcgcgccggcgggagcggaccactccgcgcatgccgccacggtgatggcttgcgctgcggccccgggcgagccgaccgtccctggttcgtcgcccgaatttccggccgccaccaccacgacagcaccgctgctcaccgctgcatcgacggcctggctcagggagtcctgtccgtctgacggcgcgctggagcccagactcatggaaatgatccgcaccccttgggacacgcaccagtcgatgccggcgatgacctggctctcgagtccggagccggactggtcgagcaccttggccgcgtagatcgctgcgccgggcgccacgcccttgtaggtggcggcgcccgagccgcccgtgccgtcgccgaaggcgatcgacgcgacgtgggtgccgtggccgtggtcatcatatgcactagtccgtccattgatggcatcaaagaacgggatcggtcgcgcgtcaagctgctcgtggttcgaatcgacgcccgtgtcgacgatgcaacccttgatgccggcgccgtcaaccccgaagctggtgcgtgtcgcgtccgtgccgaagtcggcgcgggcggcgttgagcttggtcgaaacggtgaagtcctcctcgatccgccgcacgccaggctgctgcgccagcgcccttatctgggcggtcgtcatggtggcggagaatccgcggatgatcctgaattcgcggtccagcgtgaaagcaccgaccgcctgccgcgccgtggccgcagtgcccgggccgctgaacgtgacgacgacacggacgaggtcacctggccgtgccgctgcgatccgcgcctgcagatcatcggagatccggtcgccgtcacggtcgactaggcgggccgaacgcgctgcctccgtgccgggtgccgcccggttcgagtcgggcagcggcgcggcctgaatggacaaagcgacagccgtcagacaacccagtacagcgaaatggcgcattttaggttcccctttttgcttgaggcaatttcgggagcgcgcagcttcccgacccgtcaatcgtcgtcccagcctcgggaaaggcttccaatgggtgtgcgccagacggtcaagcaagcgcgaccggttcccgtgaaatgcggaaaattttccatcagatcaagaacgaacggacagctctcagctctcagctctcagctctcagctctcagctctcagctctcagctctcagctctcagctctcagctctcagctctcagctctcagctctcagctctcagctctcgaagtctaggatgcgaagtggcaaacttcatgcggactgcgtgcgaaatgacacttttaccttcgatccaagtgaaagcaaaagtgccactgcaatcggggagcgttaaaaaccttggggttcaaactccgagagcccgagttgctccaggaactcaactacttcccttgacctgggttccgttggtggctcatacctagcgagtctctcgacgaggtcaccgttgatcacgcgtagaacaaagggaagttgggttttccgcaatttgtatgaagacggcgaactcgcgtggaggaccttgccgtcgtcgtagaagaaaggattgcattgttctacgcctggtgccggccaccgacgagctgatcgccgaactggcgcgctaccgccgcgcccacggcctgccgcctactccgcagcctggggagacgcgcccgctggtgctgcccgtcatcggccgtcggaacgacaaccaggccctgtcacgcggggcgccgcacctggtgctgaaggaagtgttcgccatggcagccgctcgcctgcgcgcgcgggcccgagtgggagggtcaggctgcggggctggccagcgcctcggcgcactggctgcgccacaccgccggctcgcacatggccgaccagcaggttgacctgcgctttgcgcgcgacaaacttcgggcttacagctcgctgtcgacacgagcggctatctgcatagcgaagaggatgcgcggcataatgccacgcaggagcgacaccggatcggcttgggaacggagcgctaggtcaggctaccgccttcgatcggaacctgttccatcccagaaacccgcctgatttcctcggtcacgatggcgatcaacgcctcagttgccgtgcttaacggccgctgcggatggctcacgcagaccagatgccgaacgatacgcggcgcgacaatggtatgcatgcgcagcctgccatcttccactgcgcgctgcaccacgatgcgcggcagcaccgtgacaaagcgcgtggcttgcacgaaccgcacgatggtgccgaggatgtcgatctcgaacttcggcgcaagcgtgacgtcctgcgcctgcgtggccgtgtccagcacgacgcgcaggccatggcgcttggtcggcagcaccaactccagtgccggtagctttgccatctccacggattccggaaggtccgggccgtgctctgcgctggtcaccagcaccatctcctcgtcgtgcatcggctgcacctgcagcgccagccggccacgctggcgatgaaccaccgccgcgtcaagctggccggcggaaaccagatcgatcagagccgtactgaagccgtccgcgaccgatacctctacgttcggatagcgcgcgttgaaacgcgccagcgaatccaccagcacgctctccgtctcggacgccaccatgccaagcgtgatgcggccggccatctgctcttctcgctgcatcatctgctgccgagcgccggcgatgtcacgcacgatgggcaggaacagacggtacatcatgcgacctgcagcagtcggcaccatgccgtgcgggatgcgctcgaacagcttctgaccgaattcctcttccagccgtgcgatctgcatgctgagcgccggctgcacgatgttcagccgcttggccgctcgcgtgacggagccgtcctcgaacagcgcgatgaagtattggatttgcttgaggtccatgtgcaggcagatatcaatataagtacggcaactatatcaatttccttgatggcgaccgcaaacgctggcgtcgcaataaaacaggttgttttctcgccatccggtgtcatcaaggggtgcaagtctagctatcgccacatcataatatttgattgcatagatcaaaaaacaatattagtcgttatatctaaatctccctaatctctgtttgacgttgaacggttccgctggcctcccggcccgaaaccgtctcgcaacacggagtcgcgaatgaaaagattcgatgctggcgaaacgaccagcacggtggagacacagcagacccggccggcgccacatgtcggccgcccgatgccgcgcgtcgaggacgccgccatcctgaccggccgcggccgctacgccgacgacctcggcgtcaggcccggcaccctgcacgccgccatcctgcgctcgccgcacgcgcatgccgaactcggcgccatcgactgcgccgccgcgttgcaggcgccgggcgtgcgtgccgtgctgacgggggccgacctgccttcctggtcgaagcccttcgtggtgggcgtgaaggcgccgatggaacagtgggcactggccatggagcgcgtgcgctacgtgggcgagccggtggccgtggtggtggccgagagccgcgcactggcggaggatgcgctcgatctcatgcgggtggagtaccgcgtgttgccgccggtggtgtcgatcgaggccgccatcgccgacgacgcgagcgtgctgcatcccggtctcggcagcaacgtggccagcgaccgccatttccgctacggcgaccccgaggccgcctttgccgccgcgccgcaccgcgtggcgctgaccgcccattacccgcgcaacacatgcacgccgatcgagtgtggcgtggtggttgccgagcacttgccgggcaacgagggctaccaggtcacttccaacttcatggggccgttctcgctgcatgccgtgatggcgatggcgctgcaggtcccggccaaccgcctgcgccatgtcgcgccgcgcgactcgggcggcagcttcggcgtcaagcaggcggtgttcccctacgtggtgctgatgtgccttgcctcgcgcaaggcgggcgcgccggtgaagtgggtggaagaccggctcgagcacctgagcgccgccacgtctgccaccgcgcggctttccaccctggaagccgcggtcgaggcggacggccgcatcgtcgcgctctcgtacgaccagctcgaggattgcggcggctacctgcgtgcgccggagcccgccaccttctaccgcatgcatggcctgctgaccggtgcctactcgatcccgaacctgttggtgcgcaaccgcgtggtgctgaccaacaagacaccgaccggcctcgtgcgcggtttcggcgggccgcaggtgtacttcgcgctggagcggctggtgcagcggatcgcggtggagctgggcctggatccgctcgacgtctaccgccgcaacttcgtgcccgccgatgcctttccctatcgcgcggcggcgggcgcgctgctcgactccggcaactaccagctggcgctgtcgcgcgcgctggaagcgggcgactacggtgaactcactcgccgccgcgacgccgcgcgcgccgagggcaggctgtacggcatcggcttcgcggccatcgtcgagccctcggtgtcgaacatgggctatatcaccaccgcgacgccggccgaggcacgccgcaaggcgggcccgaagaacggcgccatcgccagcgccacggtcagcgtggacctgctcggcggcgtggtggtgaccatcgcgtccacgccggcgggacagggccacatgaccgtgtcggcgcaggtcgtggccgacgtgctcggcatcgatccgggcgacgtcgtggtcaacgtcgagttcgacacgcacaaggatgcgtggtccgtggccgccggcaactattccagccgcttcgccggcgccgtggccggcaccgtgcacctggccgccacgcgcgtgcgcgacaagctggcgcgcatcgtggcctcgcacctgggctgcgacccggccgaactggtcttcgcggatggccgcatcgtgcgccggggcgcgcccgataccgccctgccctttgcgcgcgcggccagtaacgcgccgcattggtcgccgcagctgctgccggccggtgaggagcccggcctgcgcgaaaccgtgttctggtcgccccccaacctcgacgctccggacgagcaggaccgcgtcaacacctccgcctgctacggctttgccttcgacctgtgcggcgtcgagatcgaccgtgccaccggacgcgtgcgcatcgaccggtacgtaaccgcgcacgacgccggcaagctgctcaacccggcgctggccgacggccagatccgcggcgccttcgcgcaggggctgggcgcggcgctgatggaggagttccgctacggcccggacggcagcttccagtccggcacgctggcggactacctgatgccgaccacgtgcgaggtgcccgacccgctcatcgtccacctggagacgccgagcccgttcacgccgctcggtgccaagggcctcggcgagggcaacaacatgagcacgccgccatgcgtcgccaacgcggtggccgatgcgctcggcgtgcgcgacatccgcctgccgctcacgcccgccagggtgatggcgatgatcggcttcgacgacccgccgccatcgcgtccggaactggccgaggcagcaagagaggcctcggcaaacaacaagagcggcggcaagggcggcaaggccctgagcgcgcgcggcaccgtcgacctggacgccacgcccgaggccgtcttcgccgtcctgctcgacccgcaggcgctggccaaggtcgtgccgggctgccacgcgctcgtgcccatcggcgacaaccgctatcgcgccgacgtgaccgtgggcgtgggcatgatcaaggcccgctacgaagccgagatcgcgctgtccgacctggagccgccgcatcggttgcggctcgcgggcgcgggcctgtcgtcgctcggcagcgcgcgcggcgcgggcctggtcgaactggccccgcacggtgccggcacccgtctcacctatgactacgaggccgaggtgtccggcaaggtcgccgcggtcggcggccgcatgctcgaaggcgcggccaaggtggtgctgcgccagctgttcgaatcgctcggccgccaggccgggggcaagcccgcgcgcaagccgggctggatcgcgcgcctgctggcgctcctgggagtccgtcgatgaaacccgccgcattcgactacctgcgcgccgaatccgcgcagcatgcgctggaagcgctggcccatgccggcgagggtgcccgcgtgctggccggcggccagtcgctgatggccgtgctgaacatgcgcctcgcgcagccgcaactgctggtcgacatctcgcgcacccctgacctggataccgtgcgcgtggaagacggccatctggtggtgggcgctgccgccacgcaaggcagcgtggaatggcgcccgtcattggccagcgaggtgccgctgctcgcgctcgccttccctcatatctcgcatttccagatccgcaaccgcggcaccgtgtgcggctccatcgcccacgccgatccgagcgccgagctgccgctggtgctcaccgcgctcggcggcgaggtggtgctgcgctcgctgcgccggcgccgcgtgctgccggccgccgagttcttccgcggcatgctgatgacggcgcgcgagcccgacgagctggtggaagcggtgcgcttcccgcttcggcgccccggcgcgcgctacggctttgcggagttctcggcccggcatggcgacttcgcgctggcggcgtgcgccgccatcgtcacggacgacgccattgcgctggccgtgggcggcgtggctgaccggccggtgctcgagacctggccacgcctgcagggcaaggcgctggccgaggcaatcaacgatttcagctggaagctgggcgcgcagggcgacgcccatgtcagcgcgcagtaccgccgccacctggtgcggcaactgggcatgcgcgtaatcgaggaggcaagatgagcaagaccccccacggcgcacctttgggtgcgcccccggtgatgcggcgcgatgagcgccagcgcatcaccctgaccctgaacggcaccgaacgcagcggcctatgcgcgccgcgcgagctgctgtccgacttcctgcgccatgagctcggcgccaccggcacccacgtcggctgcgagcacggtgtctgcggcgcatgcacggtgcgggtggacggcgtcgccgcgcgttcctgcctgatgctggcggtgcaggccgatggccgcgccatcgataccgtcgaaggactggccccgcgcgaaggcctgggcgacctgcaggaagccttccgccgccaccatgcgctgcagtgcggcttctgcacggccggcatcctgatgtcgtgcgcggactacctggagcgggtgcccgagccgaccgaggcgcaggtgcgcgacatgctgtccggccacctgtgccgctgcacgggctacacgccgatcgtcgccgccgtcctcgacgtggccgccagccgcgcgcgcttgcgccggattgcggcaccccttgccgaggagcactgcgatgcttgatctcggccgcaccttcctacaaagcgtggagcgcagcccccacgcccccgccatcgtcgacggcgacctgctgctgacctacgagcaatggcttgcgcgcattcgcggcgtggccgccggcttgctcgacctgggcctgcagccgggcgaccgcgtgctcgccatcctgcagaaccgctgggagatggcgaccctgcactgggcctgccagttcgccggcctggtcatcgtcccgctgaactggcgcgccaagccggacgaactggactactgcgtgcgcgacgccggcgtgaaggcgctggtgttcgagccggtcagcgccgacgcggtgctggacagccccgccgcgcaggaaatcccctgcatcgcgctggacggcgcgccgggcggctcgctgtcgttcgacaccctgctccgtgccacgccccgccgggacagcacgcaggctgaagccggcgacatctcgctcatgctgtacacctccggcaccaccggcaagccaaaaggtgttccacgccgccaccggcaggaacgcgcagccgcgctggcgcatgttgcgcagaacctgtaccggcgcggcgaacggacgctgggcgtaatgccgctgtaccacaccatgggcgtgcggtccctgctggccatggcgctggtggacggcctattcgtctgcgtgcggcgctggagcgcgtcgcaggcgctgcaggccatcgccggccatcgtgtcagctgcctctatctcgtgcccacgctctaccatgacctgctggccgagcccggtttcgacagcaacgatgtgcgcaccgtcaccaagctcggcttcgccggcgccgccatgaacgatggcctgctgacccgcctggagcacgcgttccgaccggagttgttcgtcaaccactacggctcgtccgaggtctacaccttcagcgtcgaccagcacgcggcacgcaaacccggcagcgcgggccgcgccggcctcaacacgcggctgcgcgtggcgcggcttgacgcggcctcgcccgacgagctggccgcgcccggcgaggaaggccagatcatcgccgacctgcgcggcgacgaggccttcgagggctactggaaccgcgacgacgccaatgccaagtccctgcgcgacggctggtacttcaccggcgacatcggctacctcgacgctgacggcgacctgttcgtcaccgggcgggtcgacgacatgatcatcagcggcggcgaaaacatctcgcccgccgatatcgaatcggtgctgtccctgcaccccgccgtggacgaggtggcggtggccggcgtgcccgacgcccgctggggccagaaggtggtggccttcgtcaagccgcgcggctgtgtcgacgcgggcgcgctcgacgactactgccgcggctccgacctcgtcaacttcaaacgcccgcgcgactacgtgtttgtcgccgacatcccgaaatcgccggtcggcaagatcctgcgccgcaagctgtctgcgggcgaatacagcgcactttcctctcttccccacagcgaccccatcaaggagtaacgacatgacccaggccttcgcactgacccatcccgaccagcagcgcctgcaggacctcgacggtttttccgtggagatcgacccggcccgcgagcgcgcggacatcatcctgcaccgcccgccttacaacgtgatctcgatggcggcccgcgaccagttgcgtgccgtgttcgaggcgctggacgccgatgaccgcctgcgcgtcatcgtgctgcgcgcgcagggcaagcatttctccagcggcggcgacatccgcggcttcctggaagcgtcgccggagcatgtgtcgaagctcgcgtggaacgtggcggcgccggcgcgctgcagcaagccggtgatcgcggccaaccagggctactgcttcggcgtgggcttcgaactgtcgctggcatgcgacttccgcatcgccaccgccaccacggaatacgcgctgcccgagcagaagctcggccagattccgggatccggcggctcggcgcgcttgcagaagatggtgggcgtgggccgcaccaaggacatcgtcatgcgctcgcgccgcatcccggggcgccaggcgtacgagtggggcatcgccgtggattgcgtcgctgacgccgagctggaagccgccaccgatgcgctggtcgacgaactgcgtgccttctccccgctggcccagcgcaccgccaagaagctgctcaacgacaccgaggacgcaccgctgtcgaccgccatcgaactcgaagggcactgctacagccgcctgcgcagctcggacgacttccgcgaaggcgtggaagcgttccacgcgaagcgcaatcccgatttccgcggcagctgagcgcgggcggggctgacccgcctgccgcgccggagatacggacgcatacggacccatcgacgatgcccctggcgggcatcgcggggagccgttcattcaaaaatatatggagacaacgatggaagtgctggcaaatgacaaggtgccgaccagcggcgcgcagagcgcggcgcccgtggccgcgaacaaccggcaggtgctgggcgcggtgacggcttcgtgcatgggatgggcgctcgacctgttcgacctgtttatcctgctgttcgtggcgccggtgatcggcaagctgttctttccgtccgagcacgcgatgctgtcgctggcggccgtgtacgcgtcattcgcggtgacgctgctgatgcgcccgctcggctcggccatcttcggcgcgtacgcggaccggcacgggcgcaagggtgccatggtggtggccgtcaccggcgtcggcctgtcgactgcggcgttcgggctgctgccgacggtcgcccaggtcggcctcttcgcgccggcgctgttcatcctgctgcggctggtgcagggcgtgttcgtcggcggcgtggtcgcttcgacgcataccataggcacggaatcggtgccgccgtcgtggcgcggcgcggtttccggcctggtgggcggcggcggcgcgggcatcggcgcgctgctggcgtcgatcacttacatggcaatgacggcgctgtttcccggcgacgccttcgaggtctggggatggcgctgcatgttctttgccggcatcgtcagctcggtgctggggctggtcatcttcaactcgctggaggagtcgccgctgtggaagcagctgcaggcggcaaaggccgccagcggccacgccaagccgcaagcgcatccgctgcgcacgctgttctcgcgcgagtatcgtggcatcctgctggtcaacatcctgctgaccgtgggcgcgggcagcgcctactacctgacttccggctaccttcccacttttctgaaggtcgtggtcaaggcatcccccggcgagtcctcggccatcctgatgctgagcagcctcggtgtgatcgtcgcatcggtggcagcggggcatttcagcacgctggtcgggcgcaagcgcgccttcctgctgatcggcgccctcagcctggtgctgatgcccctgctctaccagtggatgccggccgcgccaaccgccaccttgcgcggcgtctacgcggtggcgctcagcatgctcgggtgcgccggcttcgcgccgatcctcatcttcctgaacgagcggtttcccaccagcatccgcgcctccggcacgggcttgtcgtggaacatcggcttcgccatcggcgggatgatgccgacgctggcctcgctcgccgccggcacgcccgccgacctgccggtgatccttggtgtattcctcgcggccgtcacgctggtctatctggtgggcgctacgatcgtgccggagacgctgggccgtcttgtagaaaagtagggggcactgctgagctgcggggtggcggcccggacttcgctgaggcgccggccctccccccggcccctctcccgcgagcgggagaggggagcacccgcaagacctggaaggtcttaagttcgacgcattccgtcttggacagacataccgctcctacctagactccagtcacccccgggcaatgccgggattcttaacagtgaaacccggcagtctttttttttgatccgccgatctatctaccagtagatagcatcacttaaaggctgccatctcgatgacagactggccctgcgaccaaacccaaaggttgccccggccgatcggactaaacaggagagcatcatgcaagcaaagaccatcctcacggctatcacattggccgccgccctgaccgccggcgtggcccacgcagccgctcagccggaaaccgccggcagcgcattccgcgtgagcacgcctcgtgacgcctacaccgacggcgcccgcatcagcaaccgggatggctacaccgatggtgccaggatcaccaatcgggatggctacattgccacccgcaaggtcgacccctacctggacggtgcgcgcggcaatgaccgtcgcaacccgttctacgacggcgccaacgcagccgattcgcatcccgacctgcaagtggttgccggactcgaccgcaccggtgtctcggccagtcctgcgcgccaggcagacccgtacctggatggcgcacgcggcaacagcccgcgcgatccctattcagaaggcgctcgcggcgccaatgggtccggtgagcacttttcggcataagcgccgggtcatcgcggtcacccgtgcctggtctgcgcggcggcctccgctgctgccctgccctcccggcacgacgggtcctgacatttgatatgaaatcaaaagtatttgacccatacacggcttaatcaacaaatataaaccgcgcaaactgcggtccatcgacgaacttcccgagcccgcggccacgtacccccggtggccgcaccctccctgatcaaggtcccaaaatgagtctactgttcaagccctttaccatgggcgagcgccagctcgctaaccggatcgccatggcgccgctgacccgttcccgcaatccggacggggttcccaacgacctcaacgcgctctactacagccaacgcgctgacgccggcctgatcgtgaccgagggcacggtgatatcgcccagcgcccagggcttcctgttcaaccctggcctgtacacaccacaacaggtcgatggctggcgcaaggtcactgacgccgtccacgccaagggcggcacgatcttcacccagctctggcatgtcggccgtgtgagccatgtttcgatccagcccggtggcatacagccggtcagtgccaccggccagaccgcgaagaacaccaaggcctggggttacaccgccgatggcacgccgggtgcggtcgatgtgtccgcgccccgcgtactgacgaccggcgaggtctatggcgtgatcgccgattttgccgaggccgccgccaatgcgatggaggccggctttgacggcgtcgagctgcacggcgccaatggttacctgatcgagcagttcctgaacccggcggtaaacgatcgcaccgatgaattccgcggcgacatcctggaaagccgcacccgtttcgccctggcagccatcgatgcggtcgcggcgcggatcggtgcgcaacgcacggccatccgtttgtcgccttatggcggcctcggcgacatggccgcctacgcggagctcgaggaaacgtatctccatctcgccgatgaactctccaggcgcaatatcgcttacgtccacctgatggatcagagcacgcgcggcagttcggccacgccaggtgacttccttgcaaagttccgcagccgattcacgggcgtgctgatccttgccggaggcatgacgcgcgcacgcgccgaggacctcatcgccgatggcctgatcgacattgccgcattcggcgagccgttcattgccaaccccgacctggtcgcgcgcctcgcgaacgactggcccctggccatgtccgatcgcgcgctccactatggcggcggcgccgaaggctacaccgactatcccgcctacgacggcaaggccgcggcgtaaggcacctgccaggatctgccacgatgaaatccaataccgcactgctagcgctcgccatcggcgccttcggcatcggcaccaccgaatttgccccgatggggttgctccccgtgatcgccgaaggcgtcgacgtcagcatccccaccgcggggatgctgattaccgcgtacgcggttggggtgatggtcggcgcgccggtgatgaccctgctgttcagccgcttcggcaagcgcgccgcactgatggcgctgatggccatcttcaccgttggcaacctgctgtcggcgctggcgccgggatacgccacgctgctggcgtcgcgcctggtcaccagcctcaaccatggcgccttcttcggccttggcgccgtggtggccgcgagcgtggtgccgaaggagaagcaggccagcgccgtggcaacgatgttcatgggactgaccatcgccaacatcggcggcgtgccggcggcaacctggatcgggcagcaggtcggctggcgcctggcgttcgccggcaccgcggtgctggggctggtcgccattgccgcgctttggctggcgttgccgcagggcgagcgcggcaccccgcccaatgtgcgccgggaactggccgtgctcacccgcccgccggtgttgctggcgatggcgacaacggtgctgggcgcgggcgccatgttcacgctctacacctatatcgcgccggtgcttgccgatctcaccggcgcatccgacaccttcgtcaccgtctcgctcgtgctgatcggcattggtttcacggtcggcaatcacgtggggggacggctcgcggactggtcgctcgatggcgcgacgaagatcgtcctttcggcgctcgccatcatcatgctggtgctccccttcgccctctcccaccacgtcaccgcggcccttggactactggcctggggagccgcgaccttcgcggtcgtcccgccggtgcagatgcgggtgatggaagccgcggcggaagcaccgggactcgcctcgtcgatcaacgtcggcgcgttcaatctcggcaatgccctgggcgcagcgctcggtggcggtgtcatcagcctggacctcggctacagtgcggtgccagtcgctggcggcctgctggctgcggcgggattcctggtggtgtggctcagccgggcagacaggcgcgccctggtcgcttcgtgagcgctgtgtcggcgcccacgcgtctcgcaccaatccagtgagagagcaggcgtcccgcgccggtgacgagtgcccgcttgcctctcactgagaagcctgactcaggcgggaaccgccgatccgtacggaacgtccttgtgcccatagcgccgtacgcggatgttggcctgctcgccgtgcgcggtcatgccctcgatggcgcacagccgcgagcaatacgacccgatcatggcgctggcttcatcggtcagcaccttctggtaggtgcaggtcttgatgaatttgccgacccacaagccgcccgagtagcgggccgcctttccggtgggaagcgtgtggttcgtgccgatgaccttgtctccgtaagcgacgttcgtgcgcggaccgaggaacagcgcgccgtagtgcttcatgtgcttcaggaagtagtccgggtcgcgcgtcatcacctgcacgtgctcggatgcaatgcggtccgcctcgctgaccatctcttccagcgtatcgacgacgatgacctcgccatagtcgcgccaggacacgccggcggtgttggccgtcggcagaatgttcaggattctctcgacctcggccatggtctcttgcgccagcttgagcgagttcgtcagcagcacggccggcgtattgaagccatgctcggcctggcccaacaggtccgtcgcgcacagttcggcatccacgctgtcgtcggcaatgacgagcgtttcggagggcccggcaatcagatcgatgccgatccgcccgaagagctggcgcttcgcttccgcgacaaacgcgttgccggggcctaccaccatcgataccggatcgatggtttgcgtgcccaatgccatggcagcgatggcctgcaccccgccgaaggtgtagatctcgtccgcaccgccgagatgcatggccgcgacgactgcgggattcggcctgccttgaaccggcggagaagcggtgatgatgcgggacacgcctgccaccttggccgtcacgacacccatatgggcagaagccaccaggggaaacttgccgcccggcacatagcaggccacgctgtcgaccggcatgttcttgtggccgaggactacaccggggagcgtttccacttcgatatcgcgcagcgattcgcgctgcgcctgggcaaagttgcgcacctgtgcctgggcgaacctgatgtcatcgagctgccccggcgacagggaacgcacgcaggctgcgatctcgtcttcggacagacggaagcttgccggctgccagtcatcgaacttcgcggacagttccgcgaccgctgcgtcgccacgttcggcgacatccgcgagaatcgcggtcacggtgtcgcgtactttcgctgcgtcctgcgacgacgcgttggcgctgcggccatgcttgaggtgctggattgccatttgctgttcctgaggtgggaaaggaaacttgccctgtgatgcggcaagcgcagtgaaatgcaatgtacgcgcagatttgcatgcaaggctggtgcaaaacctcaagaatttccctatctggcaccagcatccggcccaacaggcattagcattcacgcaaacgaatgcaaatcatgcagccagaaaacatcaagcgaggcgacaagccgacgaacaaggtcacgctggacgcggtcgcgcaacggcttggcgtatccgtttcgacagtgtcccgggcattggccgggcaccctgccatcagcatgcaaacgcgtgacgcggtgatggcggtggcagcagacatgggctaccgcgtgccaacggaggggcggcgcgccaagaagacatcgacgaagctgattggcgtcgtcgtcggggcgctgcataaccgcttcatgacgctgttcctgacgcatctgcacgatgccttgcaggagtacggctatcagatcacgttgatgatcgattcgatgaacgatgcccgcaatctcctggcgttccggcccttgatcgacggatacctggatgggctgatcttcgccaccgcgacgctggattcgcccgtcgttgcggaaatgcaggcccgaggcgtgccgctggttctcgtcgtgcggtccgtggacagggtcaggaccgacattgtcgagatcgacaacatccacgccggcgcggtcgccgtcgagcatctgttccagcttggccatcggcgcatcggcctgctcatggggccgcagaacacctcgaccagccgcgatcgggcacaaggcgcactcaggtggctggcggatgcgggcgtggatgcgaaccgtatcgcgctcgtgtggggggattacaccagcgagtcgggctactccagcgcgatgggaatactcgatgggccggaccgggtcacggccattgttgccggcaatgacacgattgccctgggtgtgctggaggccgcaaagcggcaaggcatcgaagtcccggggcagttgtccatcattggcttcgacgacatgccgctcgccggatcgccattggtggggctgacgtcgatccagcaacccgtcgaggccatggcccggacggcggcgcgccgcatgatagagcgcattggggcgggagcactgacgccgcctgtccacgatatcctgcccatcaagcttgtgcgccgggaatccacggggcctgctgcatagggaatctgcgggattggggtgggaggggccctgacttcgttgaggcgccggccctcacccccggcccctctcccgcgggcgggagaggggagcaaaccagcagaattgtccctgcagccccgcgccatcgatgcgaaccggatttccatcgataacggcctgatgaagataccgtcgtaatggcactgcaccccgtcagccggattccggctaacggggtgcagcgcaggtggcgcggcggcgcgccatcccacggatttactcgccgtactggaacagaaggcgcccttcgccaggcacgccaacagccgcctgcgccggtcccaacgctcctaacatgagcgcgaaagccagcgacaaggccatcagccctttcatgatgccgccccggccagcgttgcctccagtgccttgaggccgtcccgatagatgccctcgaacagccgcgatgcctcgtcatcgctcacgccggccggcgtgaactggccggaccattcgacgcgcgatgcctggtccccgtcgatgccgaccacgcgcagcgtggagcggtagccggtgaccgggaacggcgcctgcaggatcgagtacgtgtagctgcgcgcgctgttgtcgaaggcctcgagacgttcgacgatggcgtcgccgtccggattgacgaggctgcgcacgcggccgccctcgctcagttcgctcttggggatatacggcagccagtcgggcagcgaatcgaagcctccaatcagttgccagacgcggtccggtgcaaccggcagcgtgatcgttgcagaagcttgtgccatggtggactccttgaatcgaatgtggtcccggatcagttgctgtcgccaggcagcggcgcatttgccgcgaccaggtgctgctcgcgcagctcgcgccagaaatcggcgggaatgaccgccttcagcgcggcggtgtcctcggcgatgcgctcgggccggcttgcacccgggatcacggcggcgaccgccgggttggccagcacgaactgcagcgcggcggccttgatgctgacgccgtggcgttgcgcgatcgccttgatgcgctcgaccttgctgatgatctcgggcggcgccttctggtactcgaagtgcgagccgccggccaggatgcccgagctgtacgggccgccgaccacgatctcggtcttgcgctccgcggccttgggcatcaggcgctgcagcgcgcgctcatggtcgagcagcgaatagcggcccgccagcaggaagccgtccggctgcgcttcagtcaggtccagcgtcagttcgatcggctcgacgcggttcacgcccaggccccaggccttgatcacgccctcttcgcgcagccgggtcagcaccttgaaagcgcctttgcgggcggtctcgaaataggccagccactcgtcgccgtagaagtcctgggcgatgtcgtggacccacacgatgtcgaggcggtcggccttcatccgcttgaggctgtcctcgatcgagcgcagcgtggcgtccgccgagtagtcgttgaccagcttgttcgggcggccggcggcgaacaggccacttttctcgcccagcgcccgcgcgctggcgtcttcgacttcgtccaggatcaggcggccgaccttggtgctgagcacgtattcgtcacgcgggtgccgggacagcgcttcgcccagccggatttcggccaggcccgcgccgtagaacggcgcggtgtcgtagtagcgcacgccttgcgcccaggccgcgtccacggtggcctgcgcctccgcttccgggatgtcgcggaacatattgcccagcggggcggtaccaaagccgagtacgttaccggccagtttgtccttgatgctcatgactgctccacaaattaagttggggtgaaggcagtctagggttgccaattaagtctgtccaagacagaatttgaaagacttgattccttagaggtctgaattcaggactggacatgctagatatccgccaacttcactatttcgtggccgtggccgaagacgagcacgtcggacgcgccgccgaacggctccatatctcccaatcgccacttagccggcagattgcccagctcgaggaaaagctcgggctggtgttgttcgagcgctcccagcaacgcatccggctcacacgcgacggccgcacgttcctggccgaaacccgcgcattcctcacgcatgccaaccggctcgaatcgctggcgcgacggcttggccgcggcgacgaaggcgggctgtgcatcggctacctggaatacgcgatgcactcgggcgtgctgccgaatgccttgcgcgaactgcgcgacagccggcctgcggtgcatatcgcgctgtacaaccagcagtcggacgttcaactggaggggctgcgccagcgcagcctcgacatcgcactcgtctgcgagccgccgccacctgacgatccagacctcgaggctgcccaggtgctcaatgatccgatgctgctggcgctgcccgaagggcacccgcttgccaaagcggagcagctcagcccggatgacctggctgcgcaaaaatggatcggcgtgatgcaccaagaaaccgcgctgcggcacgacacgttcatcgcggcttgcgccagagccggcttcacgccgacgatcaccatggaggcgaccgaaccgctagccgccctgggactcgtggccgcgggactcggcgtgaccacgatccagcaaagcctgcgccaccaggcgccaccgggcgtggtgctgcacgagctgtcgtggttcagctatcgcacgcccttgtgggcggcctggcacaaggtcaacctgcggccgctggtggagatcttccgcaagacgttgctgcagacgagtggcgtggtgccggagctcgcaacggcgcaggcgggctgacgcaccgtcgctccctgaggtggcgtgagcgggtgcagacgaccgccgttcaatggcgcagaaagctattgtgtcggctttcggtcctgtcgttgccatgaagccgctggctgttccttccctcgccaacattgctgttgaggaccgctaattctatgactggcggccactaactccgcgaccgtggcgtgtcggcaaggtgttggtagcgttcgcgacgccggaccgctcctcgcccgatccgactgatcacagcattgagattgccgctgtggacgaagggatggtctcgaggcggcggtcgtgaacctcgcagaccgtcggccgacggactcagccattctcgtttccagcggggcgagaagaggttctgataatcatatagccagcctccctccgttcgggtcgaacggctggcgtagagtcgaattgcgaataccgacgtgacgcacaggaggccggcatgaacaagtttagtggaatcgacctgcactcgaacaacagtgtggttgtggtcagcgatgaagctgaccgggttatctaccaacgccaacggtcgctcgaatctcgtcgcctgtcaaaggctcgcgtggcctgatcgcgttcttctttgatggctgatcgtgggcggattgcgttatcttccgcccttcgcggtcgtatatgccgtaatcaagttccgataatccggaatatgattcgagaacaaggttcccagcccttcgatgtcgttgcgccagtcgcgatgcagttcgcaagcgacgccgaaccaggtcatcagttgtgcaccggcttcggccatgcggtgccatgccgattcgcgcgtcacttcattgaatgtccctgacgcatcggtcacgacgaacacatcgtatccttcttcgatcgcagatagcgcgggaaacgccacgcagacttcggtcaccactccggcgatcaacaactgcttcttgcccgttgccttgacagccttcacgaagtcctcattgtcccaggcattgatctggccagggcgtggaatgaacggcgcgtcggggaacatcgtcttcagttccggcaccagcgggccgttagggccgtcttcgaagctggtggtcaggatcgtcggcagcttgaagtatttcgccagatccgccagcgcgaggacgttgttcttgaacttgtccggctcaatgtcgcgcaccagcgacagcaggccggcctgatgatccaccatcaataccgccgcctggcttttgtccagacgcttgtaggtcttgctcatcttgggctcctcgtagatgcgcgtccgggtacaagaatttgcacggcccaaacacgcttggtcatacctgctgcactgcgggtacggctggcaatacttgcaaatttgtatgtccctaatagctctccgtcaacctctggcgggcgttctgcgcggctggccggtcccgggcgtgccatcgccacgaaatgcgagggcttctgaagcacggcgcaaagtgtccgctagcaccactgattgcatatgcgttgagcggttttgtagcaatacgcatagttgctggcagctccccccggtagctcgtcgtccccacgagaaccttcatggggaagatgcatgctcacttcgagcaactcaaggtgggaatcttggaaacttacgctcgaccgaccgtccttccctatatatatcgaagtgcggaggtccgccatcgtattctgcgatggcgccatcactaatgattgctctacaacgtttcctgtcatgcgctgcgccgcgcaagtgttgcggatcgctatttccgccaatgtcgagaccttgacgctttacctcattccctatcgcggtaggaatgttcattactgcgccggcggcgacctgggccagatggcccggcgcgaaggcttttccgcaggcacgcccgaagacgtgcagttgcgatatcgcgataccgtacagcggtgccgctggccttgcagcaagccgacatccccacctactgcgacatccgtttcgccagcccgcatgccaccttctgcgtgacgttcgcccaattcgggatcgtctccggcgatggcggttcatggggcctgccgaaattgctcggcctgtccaaggcgatggagatgaccttcaccgccgcgccaatcgacgccagcgaggcgctacggatcggcctggtttccgcagttgccgagggcgacaacctgatgcgggatgcaaatgcactcgcccacgccatcgccgacatcctgccaatgcgatccgcatggtcaagcgcctgctgcgcgatggccgggcatatcgatctgcgcgtgcatatggacatggcggccgcattccaggccattgcccacgcatcgccggagcacctgtcggcagtcgaaagggtgctacggcggttacgacgcgtttgagtccgggtcgtcgccgtccggaaaatcgagcgactcgtcagccctctcaagccaagccgtgtcgagcgacagccgatgtattcccgttcttggcgtccaatcgcccgcggcgaagttccccgagtggctattgcaggcgggcagtggcaaccgctggaagtggtcgggcgtcagcctaatgatcctgagcgcgacaattactgaaaggccatgcacctgctgggacttggcgcaaatatcctggagaagaggcccatgaccgctaagccaagttgtgaggtggattctccgcgcgcacctgtatgaacagatggcgcagcagatcaatggcatgttgcaccagttgcacaaccagatcggcaatgctcatgtccatacttatggcttgggtggtcgcaaagattacgacccctagcacagcaagcaccgtcaagccgaacttcagatcgtcattcacagtggccttctcccgcctcttcaccgaattcaggtccataaccgacaggggcgctacacaatggcgcaccgttgaacaattggacccatctcacttccttgtgagcgtggcagaggtgggatgcgccgttccgtgcagcatccctcgcatgtgcaactgagcttgatgggacaggaatcagaccgtgcaccccaagaccggttcttccggggccatggcctcgccgccagaatccagagcgacagtggcgcggtccgaaatgacggaaaccaattgctacagtagttcgagacccaagtcgcccaagccgatttcaggaactgggacgccctttcttttctggaacaggatgtgctgcgccaccagtctgaaacggcaagcgacccgcgatcgatcagatccaatgccctgcacggcgcagcaccgacgtgagagccggatcgaatcgcaacgacagcgcgtgcatctgatcgccgattttcttcgcctgcacgacgccgtacgccgacagctctatgtccatccagcatggtgaagcgtaagcgtcagcggaaaccatctggtgaggcaggagcagcgatgagaagggtagcggcttcacggtataaggagtgaagcgatggccgaacatcgagatggcagtagcggacacgacggacggcgagtccaccatcgtgaccgctgccgcgcagccctcgccgctgcccaagagcaacgccagcgcaggggtgctggccagcatccaggtcgacaccttcgtggtccacctgccgatcaatcggcaggagacgcgctatgcgcgcctgggcgtgcacctgccaaggggccactctgtgcgaatggaagctggcttctgccgagctgctggcaaagctgctgccgcctttgcgcaaccacgtccagcaggcgccgcgcctgcatctggacgacaccacgctgccactactcgagcgcaggcgcgccaccacgcggcaggcccatctatggggctacctcgtggccgggctgcggcaggagaacggattatgggtcgaccaccagccagcggtgctgttcgagttcgcggaatcccgcgccggcgcccatcccctgaacttcctgcgcgactatcatggctacctgcaggcggctgcctacagcggccacgatgcgctttgccgtaccggccggatcatcgagggcggatgctgggcgcattgccgccgacgcttcttcgagatcgccaaggcccagaagacgccagggctggccgcgcgggggcattggcgtggatcgccaagctgtatgccatcgaagccggcatcaagtacaggtcaccggagcacaagctggcggtgcgccaggccgaggccgtgccgctgctgtcgcagttccatcagtggctgcagggtaacgcccatggcctgctggccaggcatcgttgcgcaatggcacgcgcaagggccagggctgacgtactcggctgagagcggctgaacggtcgctgccgccctcgccccggccagcgccgatatccgcaggcggcgcctgctcggcgagccagatggcggcgcgaggttttggattttccgggaaggcggcggcacgtttgtcgcgcgcctgtgcaaagggcggattcaggcagtgagcgaaacgccccgggcagcaattatggaattacggtcctccctgcttcgctatcgcccggtttgaagtggtctgagcccatgcggcatggccgtgagcagcgacaacattaggtgcaagcggtgactactttacgtatgtgagcgggatgggacaaaagtgcgccgaacgtcaccatggcgttagggcgatccatcccgacatatacgccgacgacgcatcttgtcgaaacgtcgagggctatgcttagccatggccggccaattgggcgtcggctcgcatcatcaaccaggatcagatcggccagcgtgtgatcaatctgcacaatatccatcggacagcgcgccacaagatgacctggtggaatctcagagcccggctgcgttgcgagccgaagggcgtcctctttccgatgggcggcccatcgtcgcgaaatggtagatctgcttggcggactaacacttgcccctgcgcatcgcttccgaatttcgacgtcgagctcgaagagcggatgagcgagatgaggctgtcgcggcagccaatcggtcaggacctcattcacgatttcctcgatggtcgctggtagacgcggctttcccacttttgggcctcggtcataaggtatcaatgcgctcgccacaggatccgcgagaaagcgccggcgcaagtgataaaccgtggcccaatggattccaagcaatttgccagcagtctcagcttgcttaagcgtgaggggagccgtcccaagcggacgcaacaccctcgcaatcgccagctcgcgcttcgttgcaatcctcatcgccatgctcaaggccgtggtcttacatacgcggacagatttcctttatcgtcgctgccgtctgtagctttgcgagcggcgtctgcacgattggttgccagactggcctgatcgttgtgtctggctccgcttttggtgtgcttgttggtatccgtgcttctcgcctggtggtcctaccgacagtaccaagggctgggtcttcctgaaagcgaaagtgcgtcacatcactagggcaaccgatggatccgtcagaaattttgtgtttaggcataacatgtcaccaaggagcatgtatgccactaaaaaccacgaccagtcaggctgccaaccgtgaaccgccgccccattcccgaggacctgattgcccatttcgtaaatgggtccgatgcctgccgaggcggttcaagacgcctcgatggcattcaaaaaggccctgattgagcgcgccctgggcggagtagactgtcctgaccgaggacggtccactgcgggtcgatatcccacgccaccgtgtcaagatgcgtgaggacggcgtggtacgtaacaaggccgtcaacctggccttgggcgtgctgccggatggcacgcgcgacatcctgggcctgtgggatattcatgcggccaggcatcgccgatgcgtacagcgcgccttcgggttgcatcggcattgccgccgccatgagcagctgctcgtaggtagcgtgcagctcccattctgccttcgccgccgtcgagccatactcgcggacgttccatccgttgatctcgtcggcccgcgccttcaataggcgcgcggcttcgcggaggatttcagcgcgtttatcgaagcttgtggacgcccatcctggctgcgcacgctgcgcggcattagctgcccggtcgatatcatccgcaaggccgattccgatcgtcgccaggatcttccccgtcgacggctcgacgacgtccgcaacgctgccagtgccaggcacccaaccgttcgagaagatccgcccttcccatgcgcatgaattgctattggtcattaatgtctccgcaaatactgtaggaatatcgccagcgtcatcaattggcagagccggccagaacccgcacgacgcctgactccctcttgccgtgatccgagattaggaagaccgcgatcgcggccaccacgccggggatggcaaacaccatgaagttgaacgtgttaggaaactgctggctcaggaggtagccacccagtgcgggccctgacactgcgccgagccgcccggctgctgcggcccaaccgactcaggtcgaccgtacgtgcgcgggatataactgggctgcgaaggcatgtacgattggggttgcccagcccccgatttcggaatatatttttctccacaaagaccccatcggggagactcccctatgagcgtatacgtcgcacgtgatcgagcaagcgcgcttgagcacatcagttcgcgcatagatagtactgtcgatctagactatgaaaccgcgtgggaagacgcgttcgaactcggacgacttgggcaacagcgcggcatcgtcgtacagttccgaaccatcgaacatgtctgtgtggagtctgcagatgcgctagccagagggctccgcggagaaaaactcacattccgacagcgacacctctactgccggttcgacatgacggcattatccgaggactgtctgtgcgaactcgaggcactcgctatcaagcacggcgactacatcctgcctggtcacttgctgcaagaagccacgctcatctggaactagccagttcatgctgtcccaacagcgatacgttgggcggcatctcgcatgtcgggccaccggctgacgcaggcaagggacttcgcgctcgcatgccatcgcaaaagaactccgctgaagagcaaaaatgttgtcttcccggcatgccggccagactgcttccgggagatagcaaatctacttaagaagaatccctacgggcggaagcatcccggcaaaagtaggatgacgggacgaactttgcatgaaggaatatgtcatgcgtccccgctatgcgactgagaaggattggcctgaggttgaggccctcctgcgtgcttcctcactttgcgtcgagggggtacgcgaacatatcacccatttcatcatggtccgcgacaatgccgggctcctcggatgtgccggcgtggagcgctatggggaaacaggacttcttcgaggactggctgttgcgcagcgcgcaaggtctgcaggtctcggcgagcttctgctttccgcaatcgtggcagacgtccggctgcaaggggtcgcatcaatagtgttgcagaccaagaccgcatccggctatttcgcgcgcctcggcttcgcgccaatcaacctttctgacctgccgcctgccgtaatgcgctcgcaggaactcaaccgtcccccagccgatgtcgggacgctgatgcaaattgccttgtagtagctcgctcgcaagttcattcgccggagcgggcagccaggcgcattgcggaaccacggaggacggctcgcaacgttgatgtcgatgcaagaatttccaccacgccagggtcatcgcggctttggcttccttgaccttgctgccctattcccttcgagcggcttgaatttcccgaagtcttcttcatgcgccctgctcccgaccgtgggcttttcggggagcggtttaagccattagcgcggcacgatttgaggccaacagccgtgttcaaccggcaccgacttcgttcgtgagcggcttgccgctttcgaactccgtcacgctgcgcaaggttgtttcgcaaatggtcgtcacggcctcacgcgtgaggaaggcttggtgcccggtcacgatcacgttaggaaacgtgattagctgctgcagcacggagtcgtcgacgatgatgccggacaggtcgcggaagaacaggcccgcctcctgctcgtacacgtcgatcgccagcccgccgagttgcccgctccggagcgctccgatgactgcttccgtgtcgatcagcccgccgcggctggtgttgatgagcaaggcccccggcttggcgcgcgacagcgtttcggcattgatgatgtgatgggtctcgggcgtgagcgggcaatgcagcgagatgcagtccgcgcttgcgccgatttctccctcgtccgcgtagcgtccaccaagggcctcgaattccggggacgggtacttgtcgtagccgatcacgttgcaaccgaacccgaccatgattttcgcaaacacgcgcccgatcttgccggtgccgatcacggccacggtcttgccgcacaggtcgaagcccatcaggccttcgagcgagaaattgaagtcccgcgtgcgattgtaggcccggtggatcttgcggttgaccgccatcagcagggccgccgcgtgctcggcgaccgcgttgggcgagtagtcgacaacgcgcaccaccttgatcccgagcgcctgcgcggctttcaggtcgacgttgttgaaccccgtgcagcgcagcgcgaccagcttggtgccgccgcgtccgagcgcttccagcacggtcgcatcggcccggtcattgacgaagatgcacactgcgccgtggcccgcggcgaggcccaccgtctcattgtccaagggaacttcgaagtacttgagctgatggccttcggccgcattcgcggcatcgagatgttgacgatcataggactttgcgctgaagacggcgatttccatgatgtgtctccgcggcgaatcgcatggcgcgcttcgcccaggttgccctgcactatccgccagccagtgtggcggcgacctgtacgaacaggattttcacgatggtcattgacgggaagatatgtgccggcgtggagcgctatggggaaacaggacttcttcgaggactggctgttgcgcagcgcgcaaggtctgcaggtctcggcgagcttctgctttccgcaatcgtggcagacgtccggctgcaaggggtcgcatcaatagtgttgcagaccaagaccgcatccggctatttcgcgcgcctcggcttcgcgccaatcaacctttctgacctgccgcctgccgtaatgcgctcgcaggaactcaaccgtcccccagccgatgtcgggacgctgatgcaaattgccttgtagtagctcgctcgcaagttcattcgccggagcgggcagccaggcgcattgcggaaccacggaggacggctcgcaacgttgatgtcgatgcaagaatttccaccacgccagggtcatcgcggctttggcttccttgaccttgctgccctattcccttcgagcggcttgaatttcccgaagtcttcttcatgcgccctgctcccgaccgtgggcttttcggggagcggtttaagccattagcgcggcacgatttgaggccaacagccgtgttcaaccggcaccgacttcgttcgtgagcggcttgccgctttcgaactccgtcacgctgcgcaaggttgtttcgcaaatggtcgtcacggcctcacgcgtgaggaaggcttggtgcccggtcacgatcacgttaggaaacgtgattagctgctgcagcacggagtcgtcgacgatgatgccggacaggtcgcggaagaacaggcccgcctcctgctcgtacacgtcgatcgccagcccgccgagttgcccgctccggagcgctccgatgactgcttccgtgtcgatcagcccgccgcggctggtgttgatgagcaaggcccccggcttggcgcgcgacagcgtttcggcattgatgatgtgatgggtctcgggcgtgagcgggcaatgcagcgagatgcagtccgcgcttgcgccgatttctccctcgtccgcgtagcgtccaccaagggcctcgaattccggggacgggtacttgtcgtagccgatcacgttgcaaccgaacccgaccatgattttcgcaaacacgcgcccgatcttgccggtgccgatcacggccacggtcttgccgcacaggtcgaagcccatcaggccttcgagcgagaaattgaagtcccgcgtgcgattgtaggcccggtggatcttgcggttgaccgccatcagcagggccgccgcgtgctcggcgaccgcgttgggcgagtagtcgacaacgcgcaccaccttgatcccgagcgcctgcgcggctttcaggtcgacgttgttgaaccccgtgcagcgcagcgcgaccagcttggtgccgccgcgtccgagcgcttccagcacggtcgcatcggcccggtcattgacgaagatgcacactgcgccgtggcccgcggcgaggcccaccgtctcattgtccaagggaacttcgaagtacttgagctgatggccttcggccgcattcgcggcatcgagatgttgacgatcataggactttgcgctgaagacggcgatttccatgatgtgtctccgcggcgaatcgcatggcgcgcttcgcccaggttgccctgcactatccgccagccagtgtggcggcgacctgtacgaacaggattttcacgatggtcattgacgggaagatcatcgagtagccgaggtcgggccggtcggtgggcgcgacgcggttggcaaaggcaaggatggcgggattgccggtcgcgccgcagatcacgcccaccgccaggtcgaacggcagcctgaagacccagaggcagaaaatcgcagtaatcagcagcagggcaagcagaatcaccacgccatagatcaggaaggacaccccggttacgccgatggtggcgaagaacttcggcccggatgcaatgcccacctgtgccaggaagatggtcagcccgaagttgcgcaggaccaggttggccgacagcggcatggtccagacgaacggcccgagacggcgcacccggccgagcatgagggcgaccagcagcagcgccgccagccccagcgccagcgtgccgacgcccggaatcggcaccgggatcagccccaccagcagcccgagggccgcgccgatgccgatcgagataaagctcagctcggcggtgcccttgatggagtcgccgaacagcgcgcgaatcggcttcatgtgggcgcgattgaccagcaggccgacgcggtcaccgaactcgagggtgaggtcatcccggggcatcaggtccgcatcaccgcgccgcacatgggcgatcgagcagaccatgccttcgggaaagcggatatcgcgcagcgtgtgtccgaccacgagccggctagaggcgaacacgcgcatatagtccaggtcttcgcgatggcttgtcatgcggcccggctgcagttccccgcacagcgaggtggcttcacgcagcacggccgggtcagtggcggtcgcgagcagcacgtcgttggcctgcaggaccaggtcgtcggcggaggggtggttgtggtgggcgcgacgcacggcggcaatcgccaccccgtccggtaggcgcgctaccacctccgacagccgcgcgccgataaacgccgggttcgtcagcgcaatctcggcggtctcgatcagctttggcggcggccgcacgatattcggcttgagcagcgcggtgagcgcatacagaaacaggatcggccctgccacgccgactgggtatgcgacgctgtagcccaccgcggcgccgtcgctcttcatcgccgccatcgcggcctgcaggcttgccgtgctggtgcccgcgccggcgaacatgcctagcgactcgtctagcttcacgccgaccagcggcaccaacgcaaccgcgagcagtccggagccaaccacgccgaggaccgcagcggcgttggccttgatgccatcggggctggtcagacccttaaagaactgctccccgtactggatcccaatgccatagagaaagagcagcagccctagggtgccaaggatggcaggcggcgcggacttcggcgcgaacccgccgatcgccagccccacgaacagcaccgcgcccgaaccgagcgacacgcccttgatattgatctcgccgaagacatagcccagtgcaaccgtgaggaacagcgtgagcagcggctgggtttcgagcaatgtccggactgcatccatggcagctcctttctgatgggcaggagcaaggggggcagcgataagcaactgcgcagggtcacgcgcgcactgcgcggacggggttgacaaccgttttccgggcatgcgttatcgagtgcggcttgcatgaacccgatcatcgtgacaggcaccggccggcacggcggcaaccaccggaatgcccctcgaaaatatacgatgcgccgcacaagttcaagaattgaagcggcgctcggtcaaacaggcggttggcacctccagacacaaatcttctgccaaaccctatctccaccttacggtagcgccggcctcactttcccccacatgctgcggccaaccgcgcgctagccaatcgaggcgatcatcgcgtcggcgagatcttcgcagcgcatccaaagccgccggaaatccaccaatctgctggcatccggtatgtcgggtgggaacgggcacgaatccgtgcggaatatgcaggctatcgccggtcaattcgacgtacggctcagcttccaggatccatcagaaggcagcccggtttctggggtcacgctgatcctgccaagctgcggtgcaggcaatacccgcaaatggggctgtgcgacaacgctgcatgggactaaattacggcaatgccgaaacccctttctcctgcttctgaaacagccggcaccggacgcctgccataccgaatcgacctggagttcgcgcgtggcctggtctggttccggcgcgacctgcgcgccgacgaccatgcagcgctgcactatgccctcaagcactgccgccaagtgtggtgcgtgtttgtcttcgatcgcgaaatccttgacccgctgattgcacgcggacgcaaggtcgatcgacgtgtagagttcatcctgaggtcgttagagccgttacgcaggacgctgaccgatgcgggcggcggcctgatcgtgcttgacgatatcgcgcgcgatgccattcccaggctggcggccgaactcgatgccgatgccgtcttcacgaaccacgactacgaacctgccgcgaagcggcgtgacacggccgtgcgtcaggcactggcttccgactcccgagtgctgttcacattcaaggaccaggttatcttcgaggctgacgagctcttgaccggccaaggccagcccttcagcgtcttcgcgccgtacaagaatgcgtggttacgcgcagtgcagccgttcgaccttcgaccgtatccagtcgaccagtatctgggcgcgctggcaccggtgccccgtcagtatcaaaaggcttcgccgatgctgcacgatctcggcttcgctgccagcaatcttgccgagattgcaatgcccacgggcagtgatggcgcccgtgcactgttcgatgaattcatcgaccgcatcggcgattatggctaccggcgagatttcccctcgctgcgcggcccgagctacctatcggtacacctgcgcttcggcacgatctcgatccgcacgctggcgcgagccgcgcttgacgccgtactgcgcggcggcagcgaaagcgccggcgcggccgtctggctatccgaactgatctggcgcgacttctatttcatgatcctccaccaccatccccgcgtggccgacggcaagtctttccgccccgaatacgatgcgctgcagtgggtcgactctgtcacgggtgacaaatactttcaggcatggtgcgacgctcagaccggctatccgctggtcgatgccgcgatgctgcagatccgccagagcggctacatgcataatcgtctacggatggtgactgcgagctttctcgtcaaggatctcggcgtcgactggcgacgcggcgagcaatatttcgccgaccagctcaatgatttcgatttctcggccaacaacggcgggtggcagtgggctgcgtcaacgggctgcgatgcacagccgtacttccgtatcttcaatccggtcaagcaatcggagaaatttgatccacaggggcgatttattcgcaagtacttgccggtgctggcacagatgccggaccagtacatccatgcgccatggacggcgcctgtgaatgtactggctacagcgggggtgaagcttggagagaactatccacccccgatcgtgcagcacgaagttgcgcggaaacagacccttgaaaggtatgcggcgataaggaaatcaatatagccgttgcagatcgcgattccggctaatggcgttcgaccggctcgagcgccctccactccccggctgctctccgggccatcgcactaagccactagggcgcggaaaacgccgcgccgatttgccgtgcccgtttcatctcgtcgccgtgcaggtagatcgaggtggtcgagatcgaggcgtgacgcaggttgtccctcactgtcgtcaattccgcgccgcgcgccagtgcatgagtcgcatgagtgtgccgcatccagtgcgggctcgcctgccgcagcttgtcggcggcggaagggtgatccgcctggatcaagtccgccacttgcctgaagaagcgccgcaacacgccccacaggcgcgtgccggtgatgccactggccggatcctggccaaggccgccgatcagtggggtatgcgggtcccatcgcgctggcgtgactggcaggcctcgttccaccagatagctgtcgagcgccaggcgcgccaacggtggcagtgccaccttgccagccttggctcctttgccaaccagcttgagccaatggtcgccatggggatcgctttcaacgtcgccgagcgtcgcaccgacgagttcgctggcgcgcagtccggtggcgtagccgaagtccagcacaaagcgcaggcgctgggccgccgggccgtcccagccataggaccattcgaggccgtcagcaatggtgcggatcagcagccattcgccttccgtgaacgcgtgcgagctgtccagcgccaccgaccgccctcctccgcgcaccttgatcccggcgaacggattggccagcacatagcgctgctggatcagccagcggaacatcgcccccagtacagacaaggcatgggcggtggagcgcgccgagaggctgccggtgaacggacgccagtcgggcgaggtacgtggtctcgctggccctacccagcgttcccggggcgccggtcgccgcacgaagctgcgataggccgtcgcatcctcagtggtcagcgacgacaacggccgttcgcgctcgacaatcgcccacaggatcagccgctcggcctctttgcgataggtgcgctgcgtcgctggcgactcatgcaaggccagccacgcctggatcgccgcgtaatcgttgtccgcattgagggcgcaggtcgcgcgcggcgcgcggaacttcccccgcgacccatccacttcatgcggcagccgcagttgctcccatggcacgaccatgccccgcggcgcctgcgcgagcagcgcccgggcgcgctcggtcagttgggggtgccgggcaaagaaggcttcgacctgtcgggccccggccgcgcccaggccggggatcgcggcccaccagcggcgccggcgcggcacccgaacggtcagtgccgccagcgtgtcgatgccctgcgcgcgcagcgcggcgaccgtgcgcggcgccagccacaagccgatgtcgtcgctgattgccggtgccggcggcggcagcgtacgcagcgtctcgatggcatggtccgctgccctgcccttctccgcccgctcggccgcggaaatttcaaacagcgcagccaggtcctcgcgctggcggctgcgggcgtatgcggcaagctggcggcggatgcgcccgaggatgccgcgcgacgactggccctgcgcccgctcctcgcccagatatcgtgcgacggcttcgcgcgtcgtcagcccggcatgccaggcgcgcagcgcggcgagtgaggtggcatcggggaagccggatggcggggccggttccggcggggtcagggtcaagcgagttttcatatacgccagtttagcgcatcgatgtatctattacgataaggatacttatcgtaatagctggatcggtagcttgtagcgcaagggctggcgccggatcgctgcgccatgcgcgcaacggtcagggccgtcgatgttccgatggtgttgcggcgatcccggggacttgccgttggtaatcggaaggcgccatcccctcccagcgcctgaaggcacgtctgaaattcgccaggtcactgaagccgagcgtgaatgcgatctcctggatagtcagccgattcgccttcaggtgcacaattgccagccggcggcggatatcgtccagaatttcacgataggaggccccctcctccatcagcttgcgatgaagcgttcgcggcgtcatgttaaggtgccgcgcggtggcgagcagcgtgggaaatccaccttccttctcgagcatcaggcgcctgacccgggccgtcagcgtctgctggcgattgagcttgccaaactgttccttgcacagctttacggcttcaagaaagacctggggattgccggtcttgagcggctgatccaggtacgccaccggaaattccaggccggcccaggtctcgtcatagcgtacctggcagcgaaacaggcttgcggccagcagaggaatcacgcctgcctggtagcgctcgctacatgctgacgcagctcggcgaggaccgcatcgacggcatccgccaggcggattcgcgcgagcgcgtgttcggcgcggggcccggactgctggtgcaaggtgatggctggcaggtcttgctgaacgcatacaaggaatggggcgcaagaaatcgcccggaaggcagcaagacgtcctgcgggtgctggcgccactatgagtttgcggcctggcagcctcgcgcgaagcgcgaatcatggcgcgcggcaaggatgcaccggcccgattgtgctcagcccgcgcgcgggccctccacgaacgcggcgaagccggcaacgaactccctgagccgcgcacgcatgccggcatcggtgagttcgccctgcgcgtcgaatacctggccggcccgcgcaaccagcagccggttgccggtatagtgccgcgtgcccagcgtcttgagcaccggcagccagtcgttctgtgccagcaccgtgccgaagcccccggccgaggcgccgagcaccgcaaccgggcgattgccgaagaccacgggaatatccccggccggccgcgagagccagtcgatagcgttcttgaagaccccggggatgccattgttgtattcaggcgtggccagaatcaggccatcgctcgccatgacctgttcgcgcaacgccaccacggcggcgggcaagccctcacgcgcctccagatccgcatcgtaaagcggaatgccatgcagggtggcgatatcaagccggacctgcgtgcccgcctcagcctgcgccgcccgcagcagtgcggtgttgtacgactgtgcccgcaggctgccggaaattcccaggatctggatcatttgtcacacctcttttcatgaagatgaaggatacagttttgctcattatccagcatgatagagccttgccggcgcggaatgactccaccgcgcctacacacttgaactcccactcgaatgctgaaacgaaccgtgatgaagatacgagcggccccagtctggcgttcgcttgccgcggcctggctcgccgcaggcggtctgctcgggaccgcgtcgcaccgcgtgcacgccggacagatatgcgatgcgccctatgtccatgacggcggacggatccgcttcgaagcggacggattgacgccgatgacaaccattgccttcttccgcaacgtcaacgacttcgagcgcgacctttgctcgttcgatctggacatctattccaggtccgccctccggcgcttgatggggccgcccgtcgagaccgtgcagcgtcaccggctcgtgattgacgaacgctcgggacagccagtcgtgcgcagcctcaatgcacgcgttcaggcccacggccagtacaccgagctggtcggggaaatgagtaccaactcgaacggactgctgctgtatccgccggcgctgacagagggccaggtactcccggcggaaacgtttgcgtcccgctacgactttcgtattgtggatcgccgcaccggcaccacggtctctgatttcgttggttccaatgttcgcctgaccttgtctgagcggacggtgggtccgctgcagcgcctgaagcttgccaccggcaccctcctctgctggccgatccgatataccaagttcgtggatcctggccgctttcggctggtcgatacggatatcgaactggagccgacggtgctcgacatgaccgactggtattgtcccgcccggcgattcgtcatgcgccaggaagttcgctacaaaaatcagcaccaggttgtcgatgtggtggaaattgaatagggcagccgctgaagggtttcgccattggaacacctgcattgcatagcgccaatctgtggcgggaaaaagcgcccgatcaacgggcgcaaacggagacgaccacggaggtaaagcaggcccggctccagaaagaatgtcgcagcaaacggcagcggggatagcaaggcgggccgacatgccgtccggcccgatggacacgccgactgtctcgccccccgtcactcaatcgacctgtgctcccgagtccttgacgaccttcgcccatttcaccagatcgtccttgatcagaacgcggaactgctctggcgtattggatgcggcctctgctccttgcgcggccagcttgtcctgcacgtccttgctattcaggactttggtggcctccgcatgaagctgggcaagaatttcctttggcgtaccggctggcgcaagcaacccataccaggagaccgcgctgtacccgggaatggcctcccctatcgccggcacctcgggaatcagtcttgaccgtttctctgtggccacgccaagtacgcggagttgccccgttttcacgaacggcatcacgcctggcaagctgccgaacgttatgggaacctggccggcaaccacgtcagtagccgctgccgctgcgctcttgtacggaacgtgagtaatatcgatgccagcctttgccttcagcatttccccgagcagatgattcagcgtgccattgcccgcggaggcatagtccagttttcctggcttcgacctggccaggccaatcagatcgtggacagacctggcctggattgcggggttcgtgaccagcacgtacggcgccgttgccaccagcgtaatcggctcgaagtccttgaccggatcaaacggaatcttccggtatagcgacgggttgatggtgaacgaactgccgactgtcagcagtagcgtgtagccgtcgcgcggtgccttcgcggctacctggatgccgatattgccaccggcgcccggccggttgtcgacgacaatggggtggcccagcaccgcaccgagtctttgcgccacgattctcgccacggcatcgttggcaccaccaggcgcttgtggaacgatcagtgtcaccggcttcaccggatacccactcgcccagcctgagccgcttatcattagcgcgggaaccaagcctccagtacggagaagacgcaatgccttccctttgatacctttcaattcatgtctcctttgaagcggcatgccaccagttgtgaagcataagcagcaagccgtgattcgatgaggatgaaagaggtgaagggtgtcgtaaagcaataaatggcgagcgtgccatcgcgtttggtgatggccgaatggtggctacggggcggatggttggaagtgaagccatgcaggatgcatctgacccggccggactttcaggcgctaacgccacgcctgaagggatgcgccagccaggcctggcctgcaaggcaaggttgccgtcattgcccgcgctggctacgctgcaagcgtggcgcacgccagcttctgcgtgacggccggctggccgtccccggccggcttgctcgccgttccttgcacatatccttcccggagattgcggcatggccatccagctcaaccacaccatcgtcttttctcacgacaagaaggtctccgccgacttcctctgcgagatcctcggacgtcccccggccgagccgttcgggccgtttctcggcgtgcggctggacaatgacgtgaccctggacttcatggacgcggagggcgatgttgccctgcagcactatgccttcctggtcagcgacgccgaattcgatcagggctttgcccgcgtccgcgcgcgcaacctgacctactgggcggacccgtaccgccgccgcccaggcgaggtcaacaccgacgatggcggccgtcggatctacttcgaggatccgagcaagcactttctggagatctttacgaagggctagtgtcctgtcatgagcctttgacgagacactggcgccctgccacgccagctcgatgctttgcagcgttgactgcgcttggttgatgcggttgcaccccatagaatgaagttgcgccttggaaagcggctctggtttctgccgcatcaaaggaggatgtcatggaacttcatatgcaatcgcatcgctacgcgcaccggtggccggactggcgtgcggcggcgctggcgggcctcgtcgccggggtggtattcctggtgctcgacttgctggcggccatgctgatgggggccagcgtctggaagccgctgaccatgatcgcggccatcatgctgggccctgatgtgctggcgcaagctgccaccttccagatgagcgtgctggtagcggccgtggtggtccacttcgtgctctctgtcgtgttcgcggtgatcctggcagcgatcatggcgccgttccgtttcgattcgagcgtcggcatggcctcggtggtgggggcgctgttcggcctggtcctgtacctggtcaattttcacggcatgactgccgtcttcccatggtttgccgaagcgcgaggctgggtgaccgccattgcccacatcgtgttcggcctggtcgcggctgactcgtatctgaaactggagcggcacgtggatgcgtccgccggcggaactggcggtacctaggagagcaagcgcaaaacgagcagcggcaaggcgcgcgatccatgcagaccgtcgcctatccctatcagccagtgcctgaacggggcaccctgaggtgcttcctgctggccttgttcatgcacctgctgctgggtgccctgctctactatggcgtgcgctggcgcagcgcggcgccggagggtatcgcggccgaactgtgggaggcgatcccggaagccgcaacgccagcgcctgcaatcacgccggcgccaagcccgaagccggtcgaagaggaagacgccgacatctcgctgcaggaaaagcagcgcaaggccgagcaggccgcgcgcgaccaggcacaagcacggcagcgcgagaaccaggcccgtgccgaagcggcccgcaaggaggcgcagcgcaaggcgacggaagcgcagcgccaggccgacaatgcccagcgccagggcgaactggcgcgattgcggtcgcaggcgggcaattcgggaacacgggtcggctccggctccggcaccaagccttcgtccggttatgccgagcgggtccggcagcgggtcaagccgaacatcattttcaatgaagacgtcagcggcaatccggcggcggtggtggccgtgggcatggcgccggatggctcggtgctgtcgacgcggctcgccaagtcaagcggcaatgcggcctgggacaacgccgtgctgcgcgcggtgcagcgatccgacccgctgccgcgcgacgaaaacggcgttgcaccgtccaatatcctcattactttctggcccaaggacgaaggcggctagtagtgccgcctcctgtgccctgtccaggcgctacgcctctatgtagcccttgcgcagtttctccgccaccagcttgtccgcctcgcgccgtgcccgctcggcgctgtcgaaggtcttcacgctggtctgccctgtgctgccgatgcggccgtaggtgacggagagctccgccccgcgtacgctggcacgccagaacttgcgcgatgtgccctgttcgaagcgcaggctccgaaccagttccgcttgcgcagccgatgccgtcgccgcgtccgtccgggcctcgcccgttgacgccggatcctgcgccgcggccggcttcgccaacggcaccggcatctcgacctccacgtccagcgcgcgatcctcgccatcggccagcatggcctcgatgcgggccagcaccgcgtcccgatcgtcgagccagtccttgccggggatgtccagcaccagccagccgaagccgcgcaggacgccggggcggaacacatagcgctcggcggtgtccgtcaccggctcggacggcgcatcgagcaggatcgccagcgcgtagccttgtcccgacggatcggcgatggccaggtcgcagcggaactgcgagcggccgacgttggcgtgcacctggtggccgcgcgcacgcagcgcctcggccagtgcgtcgcggacgctgtccggcgtggcctcgcgcgtgaaggcgtcgcgcgcgccggggttcagcgcgccgagcaccgactgggcgcgttcgaactgcccgcgcgcgctggcctgcgcgaactgcaggaacgcacgcagcgcggccgcgccatcgttgtgcacgttggtgatcgcctcggcctggatcgtcgacaccaccgccatccgatggcgcgcgcggctgaagatcacgttcagccgcttctcgccgccgcgctggttgatcgggccgaagttcatcagcatcttgccgtccggccccggcgcgtagcagatgctcaggatgatcacgtcgcgctcgtcgccttgcacgttctccaggttcttgacgaacagtccgttgaactggtcgtcgtcctcgcgcacgtactcgcgctcgaggcgcatcgcgaagtccgcgtcctcggcggccagcgcctcgagcgcggactcgatggcgccctgctgcgcctctgaaaacgccacgatgcccaggctcagcccggtctcgcgccgcagcagctcgcgcacggtccgggcgatgtagttcgcctcctgcgcattgcggcgctccgcgtagacgccgtcggccagccggtggaagctgaccggccgcgccagcagcgcgtcggcgcccgcgatgccggcatcttcctggtccgaacgcagcgcaggcgcctcgtcctcggcctgctccagcaaacggtcgggaatggtgaccaggcgtccgtcgtagaacgccgcgttggaaaagctgatcagcgactcgtgacggctgcggtagtgccacgccagcagcgtggcgggcaggttgcgcgcggcctggttcagcaggctgtccgaatcgagattgatcgcgatgcgctcgccctcctcttccacgacgatctcgtcgtcgccctcggcaccgccggccgtgaagaaacttgtcggcggcagctgcatctcgtcgccgaccaccaccacctggcgcgcgcggctcagcgccggcacggcctcctcggtcggaatctggctggcctcgtcgaagatcaccacgtcgaacagatcaggcgacagcggcagcgtgtcggacaccgacaatggactcatcagccagatcggcttcaggtcgttgatgacgaggccggtctcgtcgtcgcagagatcgcggatcgagcggtggcgcatgctcttgccgaactcgtgctccagttcgcggcgacccgtggcgtattgtttcttgaacgccttgccgtcggcgtccagcatcgtggccgacagcgaggacacgcgcacgtgctcggcaaactgccggtgccgcgtggcgcgaaccacttgcgcgttcagcgcgagcagttcacgctgcccttgcgccacggcgcgcgcagcctgcgccagcgccgcgccgccaaagcgcgccagcaccgggttctcgcgcgtgagacggcgcagtgcctcatcggcgaccagcgcctcgagctgcaccggtgcgtgatcgagccactgcagcatggcggcacaggcggggtcgcccgcatgcaccgcgcgcaacagcggcaacaggtctggcaggtcgtccagcgcctcgcgcaggtcgcgcagcagttcggcgatgtcgccgaggcgcgcatcggcggccagcgccagcccgtcgcgtacacgctgcgcgagcttctccagcgactcgcgcgcaccggcctcggcgcgcgccgccgcgaccgggtcgacagcctggcgcaagtgcgcgaccagttcgcgcgggcctgcgcccgactgcaggcgccgctcgagttcgccgagcgcgcgcaggaaagcccgcatctcgccgaccccgtagcggcggcggctgtcggcatcggccgccgccagcgcggcgctcgcggcgtgctcagcggccagcgcttccagcaccttgccgtagcccggatggacggcgtgcttgccgaagtcatagcggcgcttcagttcgccgcgcagccgccaccatgcgggctgcagccagcgcgcgaacgacggctccagccgccgcgcgagcgccagcgccgattcggtatcgccggggctcagcttgtcctgccagttagacgttgcggcttgcgcgtcggcgagtgcctgtgtgcgcgactccagctccgcgcggatctcgcgcagcgcggcttgcgccggcgaggccgcgtcgagcaggtccagatgcgcggccaggcccgtgtcgagcagccactggctgtcggcggcgattgcgcgtgcctgctccagcgcggtgtcctggccggtcaggctggcggtactgtcgagcagcgggtcgagcgcatcgaacagcgcctcggcgtcacggcacagctgctcggcgcggccataggcgcgctcgtcggccagcagttgcggcgacaggcgcgcgaacgggtgcgcggccaggctgtcgacaccgaagcgctcgcgcatcgcgcggtgcacgcggtgcgcgagatcgcgctgacggtcccaggcggccagcgccggcaggcgctcgcgcagcgcaggccctgcctcgggcacagcgggcaacgcggccacgcggcgcagcaacgcacgcacgctgtcgccgagtgcctcgggcgcgctggccatcgccgactcgaatgcgtcgatgcgctgctggtatgcggccagcgcctcgacgacctgcgtgcggcgcgcagccagcgcgtcgccatcgtgcggctgcgcgatccactgctcgtagcaggcacgcaggtcggcaataaaggccttcttgtcggtctgcgagtcgtggatcagggagcacagcgagtccagcccgctttgcttgagccggtggaacaccacgtcgagcgcggcgcgcttctcgcagacgaacagcacgcgtttgccgcggcccgcgtagtcggcgatcaggttggtgatggtctgcgacttgccagtgcccggcgggccctggatgatgaagctgcgctggctgcgcgcgaggccgaccgcggcgttctgcgtcgcatcggcccccaccacgttccactgctcggccggtgcgagcggcgcgggcacttgcgtctccacgtcgcgcggatcgatcgagaacacgcggtcgaatgccggattggcgccgggctcgtccagcaactgcgcgtagtcgcgcaccagcgacatcttgcggtagttgaagttggcgagcgtcacctgcgtcaggtccaggtcccaggcataacggtggccttcggactcctcgagcacgtagccctggcgctcgtcgctttccgcggcggcggggccgctcatgtgtggctggcgcggaccggcgcccggtgcggcgcccgcctcgaagcgctgcggcagctcgctcggccgcacccagtgctcgaacagcgcgcgtcccagcggccggtagtcgtcctgcgcatagctgtacggcggcagccagccaccggtgcgcgcggcggccgggcccggcttgcggcgctggaactgctgcatccgctgcagcgccttctgccgcaccagccgcaccgcggccttgtcgaccaggcgcagctccactgacggttccgagcggcggatctgcgcgaggatgccggcatggatctcctcgagcgagatcttgccgagatccaccgtctcgtccagccggatgtcgtacagctggctcaggtagtggcgcagcaccgggttgaactcggcctcgccgcccgcgcactggatcacgtactggtcgcgcacgcccttgcgtttgaccagctccaccggcagccacagcagcggcgtcacgatgcgctcgtccggcgcctccttcaggttgtgccagcgcaggaacgccaccaccaggcgcaggttgctgaagccatactcggcgcggtcgcggcgggtctcggcgatcaggcggtccagcgacgccggcaggtagggctggtcgtcgaagcgcagccagcgctgcagcgacaccggcttgcccgccaccaggtcggctgcgaacggtccgccccaggtgcagatatgctcgggccgcacgctttcgatctgcagcatcagcggcacgctggccacggtgacgttgacgctgaccgcggtcggacggaaatgcagcaggcggttgcgccgcgacagatcgaacaggcggtcgcgcaggtgcgtgagcacggcggcgcggcgcggcgtggcaccggtcgtgccggccagcgcacgctcgacgtccaggccgagtggctggtcgcgccacgtgcgcagccgggtcgccagcgcggcgacatcggtggcgcggtcgtggcggttgatctcggtcatctcgacgatcaccgcggcgacgatcggatgcaagcgctcatgcagcaggaacaggttgcggcgatgcgccacgaaactgcgcaggtcgtcctcgtcggcgaagtccaggccgcaggccaggctcgccagcaccatgccgagcaggaagatgtcgccgatttcgtcgtggtggccgacgagccgttcccagctggccgggccgggcaggtagaccgggcgcgcgacgggcgccgtagcgtcaagctgcagcgccaggtcggcctggtcgcgctgtccgtcgtcggcatggccgagctgcagcgcgccgacgatgttcaggcccgaggccggatgcggctgcacgcgatgcaccgcgccgatgtccatgacgggcgcctcgccatcgggccggcgcaggcgcagcgccccatcctcgtccaccaggatgctgtcgcgatcgagcgcggccaccctgccctgcgcgtgcagcgtggcaacctgcgcgaacagcggcagcaccagcaccaggacgtcgtcggtgggcagcgccgcgcccgcctgcgcctcgatcagggcgcgcagcatgcgcggctccccgctgccggtcatatccggaatggtattggtgccgtgggtcgtgctgtcagtcatgcccggccctccctggccagttcgcggtggagttggcgctggtagcggtccagctcgcgcttgccgaagccggcgtcgcggcgcaggttgccatgcagcgcttccaggctgccgagcgcctgcgccacctggccggcgcgcagcagcgccgcgtcctgctggtcggggtcggcgagcgccaggtccatcatcagcgcgttgaggtagccgcgcacgctgtcgtcggccacgtccggccccaacccctcggggccgatcgctggttcgtcgtcgcgccagtcggggaacatcatgcgcacttgcgcgagtactgcctcgctcgccagcggcgtgccggcgaggaagtgggccaggaagccgcgcgtcagcgcctgcaggcggatctgtcccggcaggtccagcttctccagcgccagcgggccgtgcagccgggtttcgatccatggatcgagatcggccgcgccctcccaccacagcgccagtgcgcgcgcccggataaaggtctcgggatggctgtgggcggcgctcgcgcccgcttcgtgggcctcgatctcggccgcctggcgcaggtaggcggccgcgtccacgctgccgatgccggtctgcaccttgaccagcgtcgacacggccggcgccaccgcacgggcggccacggcgccgccgcggtcggcgaacagctcggtgtgcagcgcgtagcggcgccaggtctcgcgatggctggcgctggcgccgggcgcggccagcgcgtcgttcaggatgcggtcggccaccaggaactggccgtcgtcgcgcgaccacagcaggtagtgggccagttcgtggccgaacaccgccagcagctccggcggcgacagccgatccagcagcggcccctgcaggatgatgtggacctcgcccggcacgtagaccagcgacgcgttcatgtcatggcccggcgactggtaaagcgtcgcgggggcgtcgatgccgaggcgcgccatcgcctcggccagcgccgcgtgcacgtcggcatgtgcgtccgcctcgaggcggtaggtgtcgcgcagcagcatcgagcgcagtgcctcgcggtgatcggcgccggtcgcgcgggcgccggcccagcgccagacctcgggctcatggcggcgcaggtagtcgaccaccgttgcgtgataggcaagcggcaccagcgcgccgcgatccggggcgtgagagtccatgcgggacgttccagggttgcgtggaagccgattctacagggggagcatggcgttggcgccgtccatcagcgcgggcaatgcccgcactggcctggcgagcatgacgttgtcgggagcagttggaggcggggatgccggcgcgagaagcggctgatggctgaagctgttggtttgggtgggcggctgatacgccgcaagtttgtttctgcccaacatttactccgccagccgggcggaattcgctgatgacggggctgcgactccatttttgtcggtccgcatccggtggcacagcttctgcgtataagcgagaggacgcccgccgcgttctgccctccttaccgcaaatcggagtaccgccatgatccgccagctcgccaacacgatcttcgccaccgccgcgattgcagtcgcctgcactgccggcattgcccatgccgccgcccgcgacagcgctcctgccggcgacaagtccggctacaccttccgcatcgacatgcgcgacgtctatagcgaagctgcgcgggccggccgcttcgacgtcttcatcgacggtactcgcgttgaggcttcacccgtcaacgagcagtccgtttccggcctcgaccgcagtggcgtgtcggccgaccctgcccgcaaattcgacatctacaccgacggcgcgctggccggcatggaccgcagcggggtatcggcagatcccgcgcgcaagttcgacgtctataccgatggcgccttggcataagcccgtgcatagcaagcctgcctcaggcaggcagccatcgtcaaacgcgcttacgcgccctttggaacgtatttctcccggctccgaagggcgctttttttctggccggagcccgcgtcagcccagctcggggtagtcgacgtagccgtgcgcaccgttgccgccgtacagcgacgcgtcttcaaacggacggttcagcggcttgttttcgcggaagcggcgcggcaggtcggggttggtgatcatcttgcggccgaacgagaccatgtcggcactgccacggcgaatcgcctcttcggccatctccttggagtagccgttgttgaccatccatacgccggtgtacaggcggtgcagcgcttcatagtcgaacggggcgttgtcgcgcgggccgccggtgtggccttccacgacatggatatacaccggatgcagcttctccagttcacgcacgacatattcgaacagtggctgtgggttgctctccagcgcgtcgttgacgggcgagaccggcgccaggcgaacgccgacccggtcggcaccaatctccttaaccacggcagccatgacttcgagcaggaagcgcgcgcggttttcgatgctgccgccatacgcgtcggtgcgattgttcgtgccatcgcgcaggaaggcgtcaagcaggtagccgtgcgcgccatggacttcgacaccgtcgaagccggcctggacggcattggctgcagcggtgcggaagtcgtcgacaataccagcgatctcggccgtctcgagcgcgcgcgggaccgagcattcgacgtagcctttgccattgatataggtcttggcattggcagcgatggccgacggtgcgaccggggcctggttgtccggctggaagtgcgtgtgcgacatgcggccggtgtgccagatctgcaggaagatcctgccgcccttagcgtggaccgcatcggtcaccttcttccaggcagcaatctgctcgggggtgtagacgcccggcgtattggtgtagccctgggcagtggtcgagacctgggtggcttcagcgatgatcaggcctacgctggcgcgctggctgtagtactcgaccaccatgtcggtcggcaccaggttgtcgtcggcccggctgcgcgtgagcggcgccatggccatgcggttggccagttcgagcttgcccagcttgattggctggaacagcgcgtcggcgaggaaggcttcgttctgtacacccatgaatcacttactccgtagttggtctatggcttgttgcggcgagaaccgccgttagcggccggctggaacaggtggtcaaacatcaggtcgacgctgcggcgcagcggctcgacagagcattcgagcttcatgcgcagcaaggcgccctcccaggcatcccacgccagcccggatagctcggcagccgctatgtcggcacggatatcgccgtgcgcctgggcctcgcagatcatgctggcgaggcgttcgcgccacgccagttgcgcggattgcagggcggcccggcagacttcgctcgacaaggcaatctccgccgcgaagttacctatcagacacccagcctgcagcttcctcgattcgtggtacgcaatcatccgggcaaagacatagcggatcgctgccattggcgcagacggcgcctcatcgatcatcgcctcccacgaccgctgcaggaaacccgcgtattgcgcgacgatgaccgccgcgaacgcttccttgctctcgaaatggttgtagaacgaccccttcggcacgccggcgtggtcggtgatctgctggatgccggtggcgttgtagccgtggcgcgtaaacagttcgcgccccgccttcgtcaaacggttggggatgtcggtcttgtctgcagtgcgtgccatggcggaataatatgaccagtcgtcttaagatgtcaaaagcactgcgcaagcgtaggcaaggacgcatttccggccctcttccgggcacacgatatttttccttgacaagggaagccccatgttccactatgcattccatcgcatgcgatctaagcggatgcgattcaaatacaactgacaaccaccagagatccattccatgagcaagatcgaaaaagtcctcgccaccggcaagacccacaccatgcacagcagcgccggcgttacctcacgcggccacaacggcacgctggacatcgcgctgtcgcccggcaacagcaccaccccggcgcacgtgttcacgaccgtccagccccacccgaccgcggaacaattgttcgcgggtgcctggtcggcgtgctacatcgccgcggtcggcctcgtggccaaggagatgaagctggaactgccgtccgacctggccgtggacatcgaagtcgacctgggccagaccggcgcggattacttcctgcaggcacgcctgaatctgcgcgcgccgggcctgccgcaggatgtcgctacgcaactcgctcacgccgccgatgcgatctgcccctactcgaaggcaacccgcggcaatatcgaggtggcgctgaacgtgtttacgtcgtaactccctgaccttttcgttatttcccattagtcgtatgcgatgtaatcggatacgactaaacatcacctgatacaaggatgcataccatgaccacgctcatctccatcgcccgctacaccgttgtcgccgccgctctgttgaccgccgccgccgcgcaagccgccggttcggcgcgcgaccctttcaccgagggcgctcgctcggtcaccagcgcagccgatccgtacaccgacggcgcacgctcggtacacggcacgcgcagcccgtactacgacggcgcccgcggcaaggtcgacccttacctcgacggcgcacgcgcctgagaccgcgtagcgccgcggaggccagattgtgcgcacgattctctgccggttccgggcgcccttccctcgggctccaggaaccgccgcggaaagttatcgcacctgcgataaaatcgcatacgatctataatcgacgcttgcgatccatccgtctttggccaacgaggcagcaaatgaaacccaccgacaagcccgccgcaaccccgatgctctcggacttcctgtgcttcgcggtctattccgcgaaccttgccttcggcaaggcctacaaaccggtccttgagcaactggggctgacctatacgcaatacatcaccatcgttgcgctatgggagcaggacgaccagaccgtcggcagcctgggagagaagctgtttctcgaatcgaacaccctgacgccgatcctgaagaagctggaggcgatgggctatgtggagcggcagcgcgaccccgaagacgagcgccaggtacgtgtgcgcctgaccaaggccggccgcaagctgcgcgagcggcgcctggaatccagcctcgccggagcgaccggcctggccccggacgaattcgcccggatccagaaggcagttgcgtcgctgcgcaacaacctgatccagtcggtgaaagacagcgaatgaaccagcacacaggatccatagccatgaccagcacagccgcccagtacagcccgatcagctgcgagttccacgaccgcctggaagacctcgccaccgtgcgcaggcccacgcagatccactaccgcgacgccgatggcttgctccagcagcgcaccgagaccattaccgacgtgtacagcctgggcggcgccgaatatctgacgctcaagactggcgagaccctgcgcctggaccagctcctggaagtcgacggcgagaagctggcggactactgagcccgcaagattccgagccggaaaagacaaaacccctcgcagcacacgctgtcgaggggttttgggaataagagcctggcgatgacctactttcacacgggaatccgcactatcatcggcgcggagctgtttcacggacctgttcgggatgggaaggggtggttccagctcgctatggtcaccaggcatgaggggttgcagcgctgaggttgaggtcaacgctgcgtatagggatgtagttggggttgtgcatgtcaactgtttcggcacagtcgcgattcacacaccaggcaaaacacactggttataggatcaagccttacgggcaattagtactggttagcttaacgcattactgcgcttccacacccagcctatcaacgtcctggtctcgaacgacccttcaaggcggtcaagccgccagggaatcctcatcttcaggcgagtttcccgcttagatgctttcagcggttatctcttccgtacatagctaccctgcgatgcctctggcgagacaacaggtacaccagcggtacgtccactccggtcctctcgtactaggagcagcccccgtcaagattccaacgcccacggcagatagggaccaaactgtctcacgacgttttaaacccagctcacgtacctctttaaatggcgaacagccatacccttgggaccggctacagccccaggatgagatgagccgacatcgaggtgccaaacaccgccgtcgatatgaactcttgggcggtatcagcctgttatccccagagtaccttttatccgttgagcgatggcccttccattcagaaccaccggatcactatgtcctgctttcgcacctgctcgacttgtcggtctcgcagttaagcacgcttttgccattgcactttaggtacgatgtccgaccgtaccaagcgtaccttcgaactcctccgttacactttgggaggagaccgccccagtcaaactgcctaccatgcactgtccccgacccggattcacgggtcaaggttagaacctcaaacaaaccagggtggtatttcaaggacggctccacgtgaactagcgtccacgcttcaaagcctcccacctatcctacacagatcggttcaaagtccaatgcaaagctacagtaaaggttcatggggtctttccgtctagccgcggggagattgcatcatcacaaacacttcaacttcgctgagtctcgggaggagacagtgtggccatcgttacgccattcgtgcaggtcggaacttacccgacaaggaatttcgctaccttaggaccgttatagttacggccgccgtttaccgggacttcaatcaagagcttgcaccccatcatttaatcttccggcaccgggcaggcgtcacaccctatacgtccactttcgtgtttgcagagtgctgtgtttttattaaacagtcgcagccaccattttattgcaaccccttcacccttctggcgcaggccagtcaagctaccagggcgtaccttatcccgaagttacggtaccaatttgccgagttccttctcccgagttctctcaagcgccttagaatactcatctcgcccacctgtgtcggtttgcggtacggtctcgtatgactgaagcttagaggcttttcttggaaccacttccaattgcttcgcagcactaggccgctcgccccacatccttgaatcccgcgcccggatttgcctgagcgccttctccaatgcagggaccgggacttccaacacccggacaaccttccgcgatccgtccccccatcgcatcatacgacggtgcaggaatattaacctgcttcccatcagctacgcatctctgcctcgccttaggggccgactcaccctacgccgatgaacgttgcgtaggaaaccttgggcttacggcgagggggcctttcaccccctttatcgctactcatgtcagcattcgcacttctgatacctccagcatcctttacaagacaccttcacaggcttacagaacgctctcctaccacgcgtacgctcctttaaatccactagcattgacacccaacgatcattgtttgggtgctttgtcgatgctgcgcatcgacaagcttggtgcacttaaaggagcgcacgcgtccgcagcttcggtatatagcttagccccgttacatcttccgcgcaggacgactcgatcagtgagctattacgctttctttaaagggtggctgcttctaagccaacctcctgactgttttagccttcccacttcgtttcccacttagctatatttggggaccttagctggcggtctgggttgtttccctcttgacaccggacgttagcacccgatgtctgtctcccgtgattgcactcttcggtattcggagtttgctatggcggggtaatcagcaatagaccccccaaccatgacagtgctctacccccgaaggtgagacacgaggcactacctaaatagttttcggagagaaccagctatttccagatttgtttagcctttcacccctatccacagctcatcccctaacttttcaacgttagtgggttcggtcctccagtacgtgttaccgcaccttcaacctggccatggatagatcatctggtttcgggtctacacccagcgactcaacgccctgttcggactcgctttcgctacgccttccctaatcggttaagcttgccactgaatgtaagtcgctgacccattatacaaaaggtacgccgtcaccccgctttaagcgctctcgcgcttaaaccgctttgcgcgccagtggtgctatttcacactggtgtcttttgacgatttttactgtcgcaaaaatcgccgaaagcgcttaaagcggggctccgactgtttgtatgcatgcggtttcaggatctatttcactcccctcccggggttcttttcgcctttccctcacggtactggttcactatcggtcgatcacgagtatttagccttggaggatggtccccccatcttcagacaggatttcacgtgtcccgccctacttgtcgtacacctagttccacaatcgtgttttcgcatacagggctatcacctgctagggccgggctttccatcccgttctgctaacaccactgctaaagagtacaaggctcttcccatttcgttcgccactactttgggaatctcggttgatttctgttcctgcagctacttagatgtttcagttcgccgcgttcgcttcccacacctatggattcagtgtgggatgacccattcgggccgggtttccccattcggacatctccggatcaaagcttgtttgccagctccccgaagcttttcgcaggctaccgcgtccttcatcgcctgtgatcgccaaggcatccaccacatgcacttgttcgcttgaccctataacgagtgtgtctcgattgctcgaaacctcgctacaggatgagttctcgcatttgtgccgtattccaagtcatctttcgatcacttaaatacattttggttgatacaatcacaacccggtatcgcgtcttgtactgcagcgtctcatcaacgctcgcgcgacacctttactacatcccatatttttaaagaacagccgatcttgcgatcgcttggcaatgccaaatggaaacgctcttgcgaagcgctttcatttggccacctggccttaaccacaaacaaaccgataagtgtgaacgctcgacttgggatgcacgctctgaaaggaggtgatccagccgcaccttccgatacggctaccttgttacgacttcaccccagtcatgaaccctgccgtggtaatcgccctccttgcggttaggctaactacttctggcaaaacccactcccatggtgtgacgggcggtgtgtacaagacccgggaacgtattcaccgcggcatgctgatccgcgattactagcgattccagcttcacgtagtcgagttgcagactacgatccggactacgatgcgttttctgggattagctccccctcgcgggttggcaaccctctgtacgcaccattgtatgacgtgtgaagccctacccataagggccatgaggacttgacgtcatccccaccttcctccggtttgtcaccggcagtctctctagagtgccctttcgtagcaactagagacaagggttgcgctcgttgcgggacttaacccaacatctcacgacacgagctgacgacagccatgcagcacctgtgtccactttccctttcgggcacctaatgcatctctgcttcgttagtggcatgtcaagggtaggtaaggtttttcgcgttgcatcgaattaatccacatcatccaccgcttgtgcgggtccccgtcaattcctttgagttttaatcttgcgaccgtactccccaggcggtcaacttcacgcgttagctacgttactgaagaaatgaatccccaacaactagttgacatcgtttagggcgtggactaccagggtatctaatcctgtttgctccccacgctttcgtgcatgagcgtcagtgacgtcccagggggctgccttcgccatcggtattcctccacatctctacgcatttcactgctacacgtggaattctacccccctctgacatactctagccttgcagtcacaagcgccattcccaagttgagctcggggatttcacgcctgtcttacaaaaccgcctgcgcacgctttacgcccagtaattccgattaacgctcgcaccctacgtattaccgcggctgctggcacgtagttagccggtgcttattcttccggtaccgtcatcgaccccgggtattaaccagagccatttctttccggacaaaagtgctttacaacccgaaggccttcttcacacacgcggcattgctggatcagggttgcccccattgtccaaaattccccactgctgcctcccgtaggagtctgggccgtgtctcagtcccagtgtggctgatcgtcctctcagaccagctactgatcgtcgccttggtaggcttttaccccaccaactagctaatcagacatcggccgctcctgtagcgcgaggccttgcggtcccccgctttcaccctcaggtcgtatgcggtattagctaatctttcgactagttatcccccactacagggcacgttccgatgtattactcacccgttcgccactcgccaccaggccgaagcccgtgctgccgttcgacttgcatgtgtaaggcatgccgccagcgttcaatctgagccaggatcaaactcttcagttcaatctctgtgtggacccgaaggtcctcgctctttcgagcggtcgctcactctcagaaaactgactgaccagatccgaagacccagtcacgttttgctgtgcgagcactgtataacttgtaaagctaaaagaccgaagtcttccgcatccgttatcaagcgcccacacttatcggttgtttggttgttaaagaacccgccctttcgggccgcatccggctttgccgtttgcgttgctgcgttttgtttgcagcggagaaacgagactataaagaagtttctgcgattaatcaatcattttcgagaaattctttattctggaaggcacactctttcgaatcgagttaatccttgcaagtcttttcccacccccgttgcgcggtgccttgcgaacgagggggcgaatcttaatgcctggatgcctgccttgcaagcgtttttgaaaagaacttgaatgagcctcctttgtcacttgaccacgcccacccacggcctgccgacgagggcgaacgcctcattacgcttgccagcgctgcaactcggacaggatctgttcagcgaggaagtcacaaggcggccgcttcgactttgcgctgcgcgccagcaccagctccagcccggctagcccgggcagcccctgggcctggccaaggatggtgaaacgggccggaacggcacatcgcgcgagcggcgccaccgccagtcccgcttcgaccatgctgagcaggccgagcaggctgggactttcataggacatgcgataggcgatcctggcctgctccaggctgcggatcgcaatgtcgcgggcgacgctgcccgactggaacacggcaatgggcagcggccgctcgctccagatttcgtgcgccgccggcgatgcggcccacaccatcggttccagccggatgaactccccggacaaccctttcactcgcgttgcgcagaccaggtcgaccgatccgtccttgaccatgggcgccagcgccacgcttggcaggccaatgacctggatctcgaccttgggataggtcgcggaaaacttcttcaggatcgcgggcaacagggacgaggcatagtcgtccggcatgccgagcaccacgcgcccggtcacgtcggggcggaccacggccgcccaggcctcgtcgcgcagggccagcatgcggcgcgcgaagctcagcaggacctcgccttccggggtcagcatcatgttcctcggcctgcgcacgaacagtggcttgcccaaagcttgctcaagcgccttgatctgcatgctgaccgccgactgtgagcggtgcacgagttccgccgcgcgggaaatgctgccggtatcggcaaccgccaccatcatggccaggacatcgaggtcaagcgctttcactggtatcagaaaaactgaagaaacagatcaattttacgcatttttcttaaccatcggtgctccggcatactggtcgaaaacgttgaccacctatgccacacgcgaacatggaccaccccttgcgcgacagcctcgcgcgcgaactgcatgcccgccccttcctgcgcatcggcggccccgcctcgctgacgcactttgccatctatgccgacggcgataccgccgtccaccatgccttgctagccgacttgtgcaggctgaccgggctggaggtaccggccgacggcgtaacgcactattcagggcgttggggcgatcacaagcaactgaagtgggagcggcacaccgagttctccaccttcacgttcgtggcgcgacgtggtgacgcggactacttctccgacctggccaccgcccatatcccggccgagtggttcgacagcttcgccggcaagcgcctggtggcgctgcgcatggagctggtctcgggcgaggccgcggcccatgcgcgcgaccacgtgcgggaatggatcgacggcccgaccctggcgggcagccacgtgctcggcggcggcgaggtgttctgcgactggaccatcccgccagatggctttacgcgcttcctggtcatcgacaacggcttccgcgaagtgcaaggcggacggctgctgcagcggctgtatgaaatcgagacctaccggatgatggcgctgctggccttgccggtggcgcgtgaactgggccgcagcgtggacaacctgcagcgctcgctcgcgccgctgatgcgcagcatggacacgagccagggcggccgccacgatgccgagctgctggagcggctgacgcacctggcggtccgcatcgaggcgctggctgaatccggcaaccgcttcagcgcgtcgcgcgcctacgagaagctggtgctggcgcgcatccaggaattgcgtgaagagcgcatcgaaggcataccgaccattgccgaattcatggagcgccgcttcgcgcctgccatggagacgtgcaggtcggtctgggcgcggcacgagcaatttgccggccgcgtggcgcgcgcgctcgacctgctgcgcacgcgcgtcaacctggcgcaggagcaggacaccacgcgcctgctcgagggcatggaccagaccgcgcgcagccagctgcggctgcagcacgcggtcgaaggcctgtcggtcgcggccatttcctactacgtgctgtcgctggcgggcaccgggctcaaggcgctgcatgcggtgcacctgccgctggacccggaactgatcaagggcgtgctgatcctgccggtggtgctgctggtgctgcgtgctaccaggcgcagcaagcatgccgggcaaaaagcggcggcgcggcgcccggctgcgaatcgggccgcatagggcagctagcctgctgtcccgccctgccccgcggctgccgtggcttgccggaggagatgcatcgggccaaggctctcaatagcctgcatctgcgccgcatcccggacaaaaagcgagccggcgaacgccagggcattgactgcgatgccttccacgcactccatggatctcggcaccagcagcagccccgcgggcatgaccagcaggttgtacggcgctgacgggtgcaggccgccctcgacatcgaccgcgcgcacgccaaccgcatccagcaacgcgcggtagcgctcgcacgccgtgcacgccatctcttccaccggcgccgcggacagatccagcggcgcgaacgcatgcgcaaatgccaggccgggaacggcaccgatggcgccggcgatccgtgccgacgccagcaagggaccaatcggcagcgccggcccaccctcggcgaacggcaacggtacgatctgcaggtgtttgtgggcctggctcgctcccgcgactgccccgccgttgtagaagcccaggctcgggaactccgccatgcaagccagcagcgcttcaaagtccgccacggtcagcagggattcctgcgcttcgaagcggcgcgtgacgatgagcaggtgatgctcgatgacattgaacttgttgagcaaggccacatgggtgtcggagatatccgcgacaaacagttccgggtcatagggcaggaatggattgctcccggcgctgctggtcgtgcgtgccttgtccttgcgagccaggctcgatacctggcggaccagaaaccgcacgccaccgtcctcgatcgccgcctcggtggtttcgatcgggcacaacgccccgctctgcaaggcatgcgccgtccgctgcaggatcgccggccacagcgtgccaggctgaaggtgtcgatggtgcatggttggctttcgctagcgtcagtcctgctcgcgcaagagcatcgccacgttgcgctccgcgagcgccgcgatggttcgcgaaggattcaggccgagcggacgcgggacgatcgctccgtccatgacatacagtcccttgtagccaaatacccggccccttgcatcgacgactccgtctgcagcggaggttcccatgttgcagcctcccagcgggtgcggtgtgatcaggttgtgccaccgtcgccaggtgagcggtacccacggatccccgccagtcgctgccgagagctgcgtatgcgctgcaatcatggcctcgatgacggccaccgatgcctgataggaccagtcgagccgcagcacacgacgccacggtgcgtaccacgtgcggcccagtctcagctggccatcgccagggtccacgccctgcccgaaccagggcatcatctgctcgaccggatcgccgtcgtcaaacagtcctccgacctccttccacacggcacgcagcttgcgggaacgcgttcgcttcatatggcgccgaatgaagttgcctgcgaggttcgggattccaccgtcctccacgaagagcgcctgtccgttcgggccgctgtggtccaacaggtcgatcgctgcggagatggttacgccatgggaaggagagatcgtcctgtggtcatagtaggctggcgtcacgaagtcgccattgtgcgcccacccatatcccaaccgtggcgaaagccccggaagtgtgcgatgctcatcccgacagcgcagcagaagctcggtgctgccgatggagccggcggccagtatcaccctggcggccgtgactgtgccagggctcgtcgtttcgttttccgggtcgatcttcctgaagcatacgcgccagccctgctgcagcggctcgagccggtctaccaggtgcagcggaagaatctcggcgccattgtcctcagccactgccaggtaattcaggtccagcgtattcctggccgatacctggcaccccacgtcacagttgccgcagtgaacacaagtgccctgcaacctgccgtgctggttcatgaatgtctgtgaatgacggtcatcgcgggcgtcttgccgtgtggggtcccaatgctcggaaaatgtcaccgccagcggcaatttacggaagcgcccgccccaaccgcaggcttccgccccctcgcgcaacagccgggttcgctcgctcaactggttatccggcacttcgctcaccgcgagcatgcgcccgacctcctcatagtgggcctgcaggccggcataggtaacctctttcggccagccctgctggaaggcttccggcttggcttccacggaaacgttggcgtagatcagcgagccgccaccgaccccggccccggcgatgacccatacgtcagagaaggtccggatatcggcccagccattgaagcgattggcgcgctcctggttccacagccaggggtcgctctcgtcgcgcgggtaagtcgcggggctccagcgccggccgcgctccagcaccagcaccttgcggccggcctgcgcgagccggcacgccgagactgcaccaccgaagccgctgccgatgacgacgacatcgtaggcaagcgcattgctcatcatgacgctccctatcgttggatgatgattggcttctcctcaatcatccgcaccgcctcgggcggcattacctgaccgtctgccggcacgaaccgggggccggtcgcgccgggctgggcgcgtatgcgccaggtgccatggaccttcgtcaatcgcttgacgccctcgcccagcttccaatgacggcagaccttctccagcttgagcgggtagatcgtcaattgcccaccctcgaaccgcatccgcaggaagcatttgtaatcggcgatgcgctgggaggagaacacttcctcggggtgcaggcgccaaagggcattgcccaacaccatccatgcgccaaacagcaggccaccgagggcgccgcccagcagcatggcctcgaccacgaacagcaagacggggggcgcattgtccgcgccaaagacatggaagttgaggcgcatgacgagccatagcagcgcgactgccagtgccaggtgcagcagcccgtgcaacgcgccgacaacgcacgccaggcgcacgccgcgcctgacatccctggtcgacagcgcagcacaggtaaagacaatggccgctgcgaacaccaccgacgccggactgtgcgccatgacccggaacagttggtggaacacctcgccgatattcccgaatgtcacttcgagcccggccagcctgtcgacgaagctgcgttgatcgcgtccggggacagataccaggctcgcgctttgaatgatccagtcgaacagcaagtacaggatcgccaccagcgcacagaacgagaggttgcgcgcaggcagttgccacgcgcgattgcgcaattgccgggaagcggatttttccggatacgctgacttcagttcgtagaactgtctggccgggcccacgacgataggcctcggcggatctggcagcaggtgcgtgccgtgaagaaatgcaccgccgcctccgcaggtgatgcgatgcggtcccgccgtgccctctcgcggcacgtaatgcgcgtagtggtgcgagttgccggccagcaccagcgcgagccggtcgcccagcatcccctcgatctcgctcaggctccggaagcgcggcgtcttggcctcgatcgaaggtacggcccgccgctcgccgcggcgcacgcgctccatctcgtcaatccagctcgcctcgggcgcgcacaatacgacgcggtcaccgggctgcagcgccgtgtgcatcttctggaagtactcgcgctgcggccggtcgatctcagactccagttgcaggtccaggccccagacccaccagccgccgggcaactgcaaggcatagtagccagtgcgctggcgtgtctcccagccgcccacgggcttgccgctgcagaacaggcgggcgaagccacgcaggccatcgtaccagtcgtgattgccaggcgtggcgaccatccacggcgcatccggcaacttgatcggctggtcgctgtatgcggggcgcacgatctcgaccggcgcagggaatgccgcccggaagggatcgacgaagcgtgtccgataaccctcatgggcaggggtcggatacacctggtcgccacccagcagcagcacctttgcccgtggcagcgtcacgccttgctcgcgcagcgtcaccgcgtgactgacgcacaacgccatggagtaggtcgagtcccaaccgtcgccggtgtcggccagatagtcgacccagacaccgccgtgcccgtcggcgggcaccgggagcggcgggttcggattcagcgtggtgagtgccgcctgcaccatgcgctggtcggcaaaggcgccgatcgccatcgccacggcaacccgcatggcagtgaacggcagctgtagcgggctcagccagttcaccatggttctttgggtgtagagttccacgcgcccggtcgcggcagacgcggaagcgatcgtcgcggagccggcagcatcggccgcagcttgcgaaccacccggatatggcgactctggtgctgacccggaatgtttcatcgccttacccccaagacttccagctcgtccgcaaggatcggggcgctcgcgcatgctggcgcgagtgccagccgttgccaatggccctacgccctcaccccctcaacatctccgccgcttccgcaatcgcccttctgatccgtgtgtacgtgccgcaccggcagatcacgcagctcatctggtcggcgatctccgtctccttcggattcggggtgcgcttgagcagcgcgctcgccgccatcagttgcgcgctctggcagtagccacactgcaccacctcgtgcttcagccaggccgcccgcagcgcgctcgcctcggggccgtcgagtccttcgatggtgacgatcttcttgccttccatctcgctcgcctggtgctggcacgacaacaccatcttgccgttgacatgcaccgcgcaggcgccgcacacccccacgccgcagccgaacttggtgcctgtcagcttgagctcgcagcgcagcacccacaacagcggcgtgcagccgtccgagcggacttcgacgctcttaccgttgacactgatctgatggtctggcatcgcaggctccggaaggcggcagggtcttcagcagcggcaggtcgcgcaggcgctcgccggtcgcatggaacaaggcgttcgccaccgccggggcgatcggcggcgtggtggactcgcccacgccctgcggcgggcgcgtcgaaggcatcacgtgtacctggatgtccgggcagtctcgcaggcgcatggccggaaaggcggtgtagtagtcctccttcaccttgcctcgctccagcgtgatcttctgccacagcgctgccgacagcccgaacacaatgccgccctcgacctgctgctcgatcagggtcgggttgaccggcatgccgcaatcgatggcgcagaacacgcgatccacgcggacctgccccatgttgcctaccgacacctcggcgacctgcgccaccacgctgccgaacgactcgtgcagggccacgccgcgccccatcttcgccacgccaggctgcttgcgcaagggctggccccagcccgacatctttcttgcctgctccagcaccgcgcgctggcgctcatccctgagcaggctcatgcggtagtcgagcgggtccaccccgaccgccaccgccagctcatcgacaaagctctccatgaagaaggcgtggtgcgagtgccccaccgagcgccagtagcccacggggatggcgaggtccacggtctggtggccgacccacacgtccggccagtcataggcctggtcgaaggcgccctccgccgtggacttgtccagccgcgacaggaagatgtcgggcaggccgaagttgcgtttcgcgacgccctccagcactgactggctggccgagacattgcgcacggcgatgacctttcggttttcgtcgagccaggcctcgaagcgcgacacgctggccggacggtagaagtcatgccgcatgtcctcggggcgcgaccagatcgtctgcaccggcacgcccttgcgcctggcggcaatggtggccgcctggcagatgaagtcgacttcgagccggcgcccgaaggcaccgccgatgaattgctggcgcagttcgaccttgtcggtgtccagcctgagcgtcttcgccacgcagcggcgagccagcccgggcatctgcgtggcagcccacacgatggcgcggtcctcctggaccagcaccgtgcagttgaccggctccagcgcggcgtgagcgagataaggcgccgagtacaggacctggatggcgggcttgccctgcttcatggcgcgcccgttgccatgctcgtaccagacgcgtgggtcggcggcgtcgagcgccttcaccagcgtatcgcggatgccgtcgctcgacagcttcgccgcttcgccctcgtcccacttgcactggaccttctccaccgcctgcatggcgatccacgcatcgctggcgatcaccgccacgccgccgctgccgccctggagcggaggcagcgcgaccaggtcgagcacgccgggcaacttctttacgtcgtcgggcggggatccccgcagcgtgccgcccagcgtcggacacatctgcacgctggcgtagaccatcgcgtccgccaccacgtcgataccgaaactggctgtgccgtggagcttggcagcggcatcaaggcgcgccgcgcgggtgccgatgagcctgtagctggccggatccttcagttcaaccttgcgaggcaaaggctcacgcgcggcagccgcggcaagttcgccgaaggtggcgctgcgccccgacggatgcaccaccttgccggcctgcgcgcggcaggcttcggccttgacgtcccactgcttcgccgctgccgcgcacagcatcatgcgggcggcggcgccggcctcgcgcatcggatgccacaggtccctgatgctggtagagccgccggtgaacatcaggcccacctcgcgcacgcccttgcgcgtgaaccattcggcggcacgcctgggccaccccttgtcgtccggccggaacggcaggttggcgaccacgccctcgatgttgttgtacaggttgtcgatgggcgacggctcgacccggatctgcgaccagtcggcctccatctcctcggccagcagcatcgccgcgccggtatgcacgccctgccccatctcggccttgttcatgaccaccgtgacggtgttgtcggacgccaccttgatccagccgttcagcgcgaattgcccgtcgcgcgccgccagcggctcgccgctcgccaggcgctggcgcggcggcagccaggcccatccgatcaccagcgcaccggcagcgcccgcaccgccgagcaggaaggctctgcgcgtcaacatggcaagactggcggatcgatcatcataggaaggccccgtgccgccgatggcatggcctatattaggtcgggaagtgccgcagcgcgaatgcgagcacgtggttggcgcaatcgcgcaacacccgacacggacatgccgcgctgatgccgcctgccggcgcaggtcgaactgctccgtgacgggtgcccgtgttccggcagatccttgagcttgggaacaagcaactgatcgactgccgcagccccagccatcgaacagttttccattagaatcagcagcttatgctactgcggaaagagcgccatctgcccagccagcagcgtctcgaaatcgtcgtccaggaagggcaggatcgcatcggcgatcggctgcaactgcttgttgacgtagtggccatagtcgaccggcgccgaccgggtctcaagcggctccggccctgaaacggtcatcacgtagctgatccagccgccatgctgatactggcgcggacgtccctggcgctcgttataggcatcggcgatacgggcggcgcggacgtgcggcggcacgttgcgctggtaatcatcgagcttgcggcgcagccgcttgcgatagaccagttgctcgtcgagctcgccggccagggtgcggcgcacgatgtcccgcacataatccgcgtacggctcgcggttgaagatcttttcgtaaagggtctgctggaaacgctgggcgagcggcgaccagtccgtgcgcaccgtctcaagccccttgaacaccatctcgatcttcccgtcgggccgttctacctggccggcatagcgcttcttgctgccaaggtccgtgccgcggatggtcggcatcaggaagcgccggaagtgcgtttcgaactggagttccagcgcgctttccagtccataggtctgccagaggtggtcgcgccaccagtcgttgacgtaggcgaccaggctacggccgatctgcctggcatcggcttccgttcgcgcgcggcgcagccagacgaatgtggaatccgtgtcgccatagatcacctcatagccgcgggcctcgatcagcgcgcgggtctgccgcatgatctcgtgcccgcgcatggtgatcgacgacgccagccgcgcgtcgaagaaccggcaaccgctggacccgagcacgccgtagaacgcgttcatgatgatcttgagcgcctgcgagagcggcttgttccggtcgcgcttggcggcctcgcggccttgccagactctggccacgatcgccggcaggcagtgcttcgtccgggaaaaccgcgcaccgcggaagccaggcagcgaatcggcatcgtccggatgcgccaggccctcgaccagcccgatcgggtcgatcaggaaggtccggatgatcgacgggtagaggctcttgtagtccagcacaagcaccgattcgtagagccccggccgcgagtccatgacgaagccgcccgggctggcctcgggcgccttctcgccgaggttgggcgcgacatacccctggcggtgcatcagcggcatgtagagatgcgtgaaggcggcgaccgagccgccattccggtcggccggcaggcccgtgaccgtggcgcgctccagcaggaacggcaacagctccgtcttttcgaagatccgcgtgaccagttcgcaatcgcgcaggttatagcgcgccagcgccggcttgtcctgctcgaacatgcggtcgatggcgtccatgcggtcgtacgggttgtcgaccgccttgccctcgcccagcagcgtctgcgccaccgattcgaggctgaacgacgggaagctccacgtggcggaacgcagcgcctcgatgccgtcgatgattaaccggcctggtgcgctggcgaaatagtgctgctgggcgttgtgctcgcgccattccatctcggcaccgccgcggccgaggcgcagcggaagctggaacttgcgcgcatgctcgtgcagcacgcgcaggtcgaactggaccagattccagccgatgatcgcgtcgggatcgtgatcggccagccactggttcagcttttccagcaactcgggccgcgtggcgcagtactcgagcgagaaatcgacgtcggcgggcatttgcggcgccgcacccagcatgtagacctggcgctggccgcagccttcgagcccaatcgaatagagttcgccgaacgcgttggtctcgatatcgagcgagaccaggcgcaacttgggccggtagcactccgacggcttcatctgggcattgcgcagcgcgccgccggggtccggctcgccgtcgaaccagaccggggcggtgatgaagcgctccatcaggtagcgttcgggcgggcggatatcggcttcgtagacatccacgccggcgtcgcgcaatgagcggctgagctggatcagttgccgatgctggcggcagtacaggcccagtacgggccggcgctggaaatcctggagcttgagcgggcgcagctcgacctcgcgctcgcggcgcagcagcgcctcggcacgctcgcgctgcgactcggggataaacgcgactgacggctgacaggacaggtgcaggtggcgcggaccatcatcggtcgccagccagaattcgacttcggtgccggccggcgtatcgcgccaatgtcgggtcaggatgaaaccctgctgaagtgccacgttaggtacattgggaaacggctaccggtcgggattctagccgatgggccaggcgcgtgagccgcgtaagccaccccgcggcatcttcggctcacgcaaaacggtcgtgcaggatagcggcggtcaattcgcgcttcttccagtacatatggtggatacgctgctgcaatttgcccagcaccatggggtcgaggctgccataggtcagcagcacggcaggctgcgagccatcgccctcctcatgttcgaggctgtcgaacggaggaaacccgtacttttccaggaaggccgcgatttcctcgtccgaggtgccaggttcgatgttgcctagcagcaaacgactcatgatggtctctcccagtcgatggaggagcggccctgccccagccccctttgcggttggcactgagacgccctaccttaattctaggatgggcttttgccctgccgtgccgcctcgatcgcggcgatatcaatctttttcatcgtcatcatggcgtcgaatgcgcgcttggccgccgcacggtcggggtcggttatcgccgcgctgagcgcgcgcggggtgatctgccatgacagtccccagcggtccttgcaccagccgcattcgctttcctggccgccattgccgacgatcgcattccacaagcggtcggtttcggcctggtcgtccgtcgcaatctgaaaagagaaggcctcgttgtgcttgaaatgcgggccgccgttcagcccgaggcagggaatgccggcgacggtgaactcgaccgtcaggacatcgccctgcttgccgtcgggatagtcgcccggcgcacggtggacggcgctgactgcgctgtcggggaatgtctcggcatagaagtttgcggcatcaagggcgtcgcggtcgtaccacaagcagatcgtgttcttgctttgcatgatgtgtctcctggaaagtcgagcaccgggaatccgccaccgggactccaatgtctcatattccggtggcgggcgcaggccgcgcaaagggcgagctgaggagccgccggcggcctctgtccaaggggcgtcgccgctgcccggcgccagtgccgactatgccaggctggtgcgcttcgagacccagcgccggggcgagttgatcagcaaggcgaacatcgcgctgggctgatgccgcaggacttctcgcgtctcactgggcctccgccgcgcgcacgaacgcgtcgcgcgcggtgatccgcttgacgtagtcctggatgcacgcgctctcgctgatgcgcggcgcaccgaatcggcccgcccatgccagcgaggcaccgagatagatgtccgccgcgctgaaggtcgcgccgagcacgaaggggccgggcgtcagggcttgctcgatggcgtcgatcacatcgtcatagtcgccccagccgaccgcctgcttcggcagcggcgcctctttgcgcatcatccggtcagtcagcgcgggttcgaagcaactgccgcagaagaacagccaccgcagcaccgtgccgcgcgcggacgagcctgcaggcggcatcaacccggcctgcggaaaggcatcccccagccaggcgatgatcgcgccgttctcggtcaggaccgtgccgtcatgcaagaccagcgttggaatcttccccatcgggttgaccgccaggaactccggcgcgcggctctcgcccttggtgaaatcgatgtgctgcagcttgtactcagccccgacctcctccagcatccagcgcgccaccgaggcgcggctctgggggttgtagtagagcgtcatggtcatactgtcctcctgccgcgttcggccgtgtggtttcgaccgccgcaggatagcatccgccggctgccacgaaccgcttccgttgtggaagccctcacccggcccgctcgaccgcccgcgcgagccgtgcgacgccctccccgatctgcgccaggttcgtgctcgcgaacgacagccggaatgtggcgcgctggcgctgctccacatagaatccggcacccggcacgaacagcaccttttccgcgatcgcgtgcggcagcagtgcggcagcatcgtcgatgccatccagcgcggcccagaggaacatccctcccgccggcaatgcgaaacggatgcggtcaccaaaggcctggcccagcgccgccgccagctggtcgcgcttgtcgcgataggctgcgacttcccgcgcgacctgtgccggcagccggcccgcttccagatactgggccgcggccagctggagccatggcggcgtgcacaggtcggatacctgcttggcaatcaccgcgcggcgcacgatctcgggcgcggcgaccatccagccgatcctcaggccgggggccagcgtcttcgacaggctggccagatgcaccagccacggccgcgcctcgggtaccgacgcgcacagcgccagcagcgaaggcggcggtgcgccatcgaagctgagcgccccgtagggatcgtcctcgaccagcaccacgcggtgccgtgctaccagcttcagcagctgcagccggcgagcggacgacagcgttgccccggaggggttggcgaaggttggcaccgtatagatcagccggggccgcaacgacgggtcggccagcatggcttcgagcgcagccacgtccatgccgtcgtgatcagactgcacgccgcgtatgtcggcgccagccagccgcaatgcctgcagcgtggcggaataagtcggctcctcgaccagcaccacgctgccgggctcgaccagcgcgcgcgcgaggaaatcgaagccctgctgcgagccgctggtcacgagcagttcgtcctgggccacgggcgcgccgcgcccggccatcaacgacgccagcacctggcgcagcgccggcgcgccttcggtggcgccgtactgcaggcattcggcgggccgctcgcgcagcaccgccgccgaggccgcgccaatgccgtcgacatcgaacagcgcggcggacgggtagccgccggcgaacgagatcatcccggggtcggacaggtacttgaacagttcccggatcggagagccagccgggttgcgcagcgcggggacgaagggataagcggcgtcggaagtcatgagcggatgcagaacgtgctggacatgggcgtgcttcagtccaccgaagcaccggacaggcgaacgatctcgccccacttctggcggtccttcttcaacacgtcggcaaatgcctccggcgagctgggcgccggttccgcgcccagctcgcgcattttcgcctgcacgcctggctcgttgagcacgcgcgtcaggtcctggctgatcttctgcgccaccgccgtgggcaccccgcgcggcgcaagcaggccgaaccaagggctggcatcaaagccggggacggggcccgcggcggcgaccgtcggcacattcggaagcgccgacgagcgcgccggcgtggtcacggccagcggcctgagcttgcccgagcggataaacggcagcgacgccggcaggttgtcgaacatcacgtcgacgctgccgcccatcaggtcggcgatggccgggctgctgcccttgtaggcgacgtggctcatctccgtgctggtcatgcgctggaacagctcgcccgcgaggtgcgtggacgtgccatttccggccgacgccatgttgacgcgcttgggattggctttcaggtaggcgatgaactcgggcagcgtctgcacgcgcgcgcgttccgcaaacgccggcgacagcaccaccacgttgggtacgcgcgccaccatcgcgaccggcgcgaagtcggcgtcggcatcatagggcagcttcttgtacaaggccgggttgatgccgaactcgcccaccgagcccatcagcagggtgtagccgtccgccgtggacttggcggccgtgccggtgccgacgatgccgcccgcgccggggcggttgtcgaccaccaccgactgcttccattgcgtggccagttgctcgccgatcagccgggccaccatgtcggtggtgccgcccggcgggtacggcacgatgatgcgcaccggcttggccgggaactcgagcgcgccggcgatgccgggcatggtcgcgccgaatgcaagggtgccggcggcgagcgcgctgaacaagtgtttcatgcagtctcctgtctacctgatggttgtcgttatgaggttgtcgtgatgacgatgccgggaggaggcggcaacgcaaggatcgaatgatttctcatcaactccaagctttcaagcgagatttccgtataggatgatgacctaaaatcatcaacccagcccttccccgatgcggcaacgacttcccagcctgtccagcctgcgcgccttcgaggccgccgcgctgcacctgaacctgcgccgcgcggcggcggacctgtttatcaccgagagcgcggtgtcgcgccagattgcgtcgctggaagcgctgctgggcgtgcagctgttccaccgcgccaaccagcgcatcacgctgacggcggccggcacgctctacagcggacaggtgcgggagttgctgcgcaagctgcagcgcgacacgctcgacctgatggcgcacgagggcgcgggcggcaccgtcgagctggcctgcgtgcccacgctggcggtcgagtggctgattccgcggctgccggccttctatgcgcggcatccggggatcgtggtcaatatcagcgcgcagtcagacatcttcctgttcgacggcaccccctacgacgcggcgattcactttggcgaggcggtctatcccggcgcgcgtgccgaccggatgttcgacgaagaatcggtggcggtctgccatccggacttcttcggcggcagaaagcggatcagcccacatgacatcgcccggtcgccgctgctgcacctcgccacacgcattctcggctggaagcaatggatggaagcggccggcatcgacgacgtcaacgccatgcgcggcgcacgcttcgaccaccattccatggtcatcgccgccgcacgcgccaggctgggcgttggcctggtgccgcgcttcctcgtgggggaatacctggcaaaccgccagctggtcatgcccgtcgcccattcgcagcgctccacgagcgcgtatcacctggtctcgccggatacccggccgatgagcgaggcgatgcagcggctgcgcgagtggctgctggaagccgcgggcgagtttgcgacaaggcagtccgcgactgcggacgatgcgggcaagtagccagccgactcacgccgcaactcacaccaccatttccagccccggcgtcggccggcgttccagcaatgcggccagcctgcgcagcgcggccgatagttgcgcgcggtcctccacgccaccgagcgagatgcggatggcagtcggcgcgttgggcccctcccagaacgcgtcggacggcgtcacgcgcaggtcctccgccagcgcggcccgggtgagctgctgcgccgaccagtgctccggcaagcggtgccatgcgtggatggcgctgggcgggagctggccgatcccgctcagccaccggcttgccagcgcgcatctggccaacgcttcggtcctgatgccgtcgagcagatgcatggccgagccatcgtggatccattgggtcgccagggcggcggtcatcggtgccgccatcagcgcgaaggcccgcagcgatgccagcagatcgtcgccgcgcctgccctccggcagcatgacatacgcggtccgcagccccggactgagggtcttggacagggtcgagacatagtacgtgcgctcgggagcgaagctggacagcggcggcggcgctgacggcgtcagcagccagtagggatcatcctccagcaaggtgacatcacagtgcgccgcggccctggcgatagcctcccggcgtgaggccggcatggtgtgcgtagttggattctgggcggtcggattgaggtaggccagcgtggcaccgtcggcacggaccgcctcgagggcgtcggggagcatcccgtcggcgtcgaccggcgcgatgatcacgcgccgcccgagctgtgccgcggccgcgcgaatgcctgggtaggccagcggctcactcacgatcgcatcgccaggccgggtccgggccaggatcacggcggccagcgcagcctgggcgcccgggcacaccacgagccgcgcagtagcgacctgcccgaatatctgcgcgagccagagggtgccggccgaccggtcggcagcactgccgccgccgagctggtaggtcatcagcaggtgcgggtcgctgtgcagcagcacctgcgacaggccgcgccgcaacaggtcctggaaatccagccccgccggtggcggcggcacgttcatgctcatgtcgatcacccgcgccagctccgcccgcggcgcggcaatgaaagtgccgagggccccgcgggcatcgatcagatgccgccgcttggcctcgttgtaggcacgcgtcacggtggtcaggtccacgcggagggacttggccaggctgcgctgcggcggcacgcggtcgccggctaccaggcggccttcgccgatcgcccgctcgatgaaatccacgatctgcaagtagcgcgcgccgccacctgttgtgatctcaagatcccatttggcactggctttggcgcggatatcggttccttgcatggatttcatccggtagatttcttcgatgtatgggttttgtcttgcattagcatgccagacatcaccgagggaatccatacaaaccacgcccgcgcggggctgagccagcacttgaatcggagcgcgtggccgggagccttcggtgatccgtaaccaaggtgtccgaaatgctcaaacctattgccgggccggcagacaagaatcgacaaggcccgctcccccgcccgtcccccggcccgcagcgccgtcttcccacactgttgctgagcgcctgcctgagcgcgctgctgagcggctgcaacctggaactgctcaaccccaagggcagcatcggggaacaggagaagtcactgatcctgatctccctgttcgtcatgctgatggtcgtcatccccgtgatcgtcctgacgctgtggttcgcgtggcgctaccgcgaaaccaatacgagcgccacctatgcccccaaatgggcgcactccaccaggatcgaggtcgtggtctggggcattccctgcgtcatcgtggcctgcctggccgtgctgatctgggattcgacgcacaagctcgatccctatcggccgctggaatcgcaggtcaagccggtccaggtcgatgtgatcgcgctgaactggaaatggctgttcatttatccggaatacggcgtcgcgtcgctgaaccagcttgcgatcccggtcggcacgccggtcaatttccggctgaccgcggaatcgatgatgaactcgttcttcatcccgcagctcggcagcatggtctacgccatggcggggatgcagacgcgcctgcacctgatcgccgacacgccgggcgtctatctcggccagtccgctgcctacagcggccccggcttctcggacatgcacttcaagaccctggccacttcgcgcaaggagttcgatgcctggatccaggctgcccgcgcttcgtcccaggcgctcgacctgaagacctaccgcacgcttgaactgcccagcagcaaggatcccgtgacgctttacgccgccgtcgcgccgaagctgttcgaccaggtcgtcgacaaatacatgctggaaaacggccagatctgccgcgcggacaccccggaatctctgcaggccttccagcgcgtcccgacggcgcccgctggccgcatggagcaataagaatgcttggaaaactcaacctggacgccatccctctccatgagccgatcatcatggggacgctggccgtcgtaatcgtgctgggcatcgcgctgatgggcgccattacgtactacggcaaatggaaatacctgtggaacgaatggatctgctcggtcgaccacaagaaggtcggcgtgatgtacatcatcctggcgctggtgatgctgctgcgcggctttgccgacgccatcatgatgcgcgcccagcaggcgatcgcctatggcgatggcgcgggctacctgccgccgcaccactacgaccagatcttcacggcgcacggcgtgatcatgatcttctttgtcgcgacgccgctggtgctcgggctgatgaacgtgatcgtgccgctgcagatcggcgcgcgcgacgtcgccttcccgttcgtcaattcgctgagcttctggatgtcggcaatgggcgcggtgctggtgatgctgtcgatgttcgtcggcgacttcgcggccaccggctgggtcgcctacccgccgctgtccgagctcggctacagccccacgccaggggttgactactacatctggtcgctgcagatatccgggcttggcaccacgctgacgggcatcaacttcatcgtcacgatcctgcgcatgcgcgcgccgggcctgaacctgatgaagatgccggtcttcacctggaccgcgctgatcaccaacatcctgatcgtggcgatcttccccgtgctgaccgccacgctcgccctgctcaccgccgaccgctacctcggcatgcatttcttcaccaacgagctcggcggcaacgccatgatgtacgtgaacctgatctggatctggggccaccctgaggtctacgtgctgatcctgccggcgttcggcgccttctccgagatcatcgccacgttctcgcgcaagcccctgttcggctacaagtcgatggtgtacgccacctcctcgatcggcgtgctgtcgttcttcgtctggctgcaccacttcttcaccatgggctcgggcgcgaacgtcaatgccttcttcggcatcatgacctcgatcatctcgatccccaccggcgtcaagctgttcaactggctgttcaccatgtaccggggccggatccgcttccatacctcgaccatgtggaccatcggctttatggtgacgttcgcggtcggcggcatgaccggcgtgctgctcgccattcccggggccgactttgtcctgcacaacagcctgttcctggttgcgcatttccataacgtcatcatcggcggcgtgctcttcggctgcctggccgcaatcactttctggttcccgaaggtgttcggcttcacgctcaatgagttctggggcaaggtgtcgttctggtgctggctggccggcttcttcctggccttcatgccgctctacgtactgggcttcaagggcatgacccgccggatgaaccactatgccaacgtcgactggcatccctacctggtggtggcgctggtcggtgccttcgtcatcggcgccggcatcctggcgatgttggtgcagttcgcggtcagtatccgcgaccgcaagcagaaccgcgacctgactggcgatccgtgggatggccgcagcctggagtggtcgacggcctcgcccgcgccgttctacaacttcgcccacgtgccgcatatcacctcgctggaacagcactgggacgacaaggaagccgggcgcgcatggcgccagccggcccgctacgaagacatccacatgccccgcaacacctcggcaggcttcatcgtgtcggcgttcgggctgctgtgctgcttcgcgctggtctggcacatgtggctggtcgccgtcgccggcctggtcggcgccatcgcgaccttcgtcgtgcgcagctatgaccgcgacgtcgactattacgtgccggccgccgaagtcgagcgcatcgagcgcgcgcgctttgcacaactgcaggaagctgcctgaccatgaacccgactctctccccccccctgcatcatcccgggcacgaggcggcccacgacgcggcgcaccaccatcacgaagccggcgcgcacacgccgctggggttctggctttacctgatgagcgactgcctgatcttcgcggtgctgttcgccaccttcggcgtgctgtccggcaacactgccggcggccccggcgggcggcaactgttcgagctgccgttcgtgttcgccgagaccatggtgctgctgctgagcagctataccttcggcctggccatgctcaggcagggcactgacgacgcgccgcggatgatccgctggctggcggtgaccttcgcgctcggcgcactgttcatcgccatggaggtctacgagttcgcgcacctgctgcaccagggcgcgggccccggcgtcagcgcctacctgtcggccttcttcacgctggtcggcacgcacgggctgcatgtcacgtctggcctgctgtggctggcggtgatgatccaccagatccggcatttcgggctggacgacatcgtgcgccgccgcctggcctgcctgagcctgttctggcacttcctggacctggtctggatctgtgtcttcacctttgtctacctgcgggagttcgcttgatgaagccgtcccatctacattccgtgcacgcggaccagccggccgcgcacggcagcgtgcgcagctacaccatcggactgctgctgtcggtcgcgctgacgatggcgtcgtttgcggcagtgatgaccggatccctgtcaacgcaggcagcgatcgcgctggttgtcggcctttgtgtcgcgcaactgctggtgcagctggtgtacttcctgcacctgggcaccggtcccggccagcgcggcaacaccgccatctttgcctgtaccggcttcctgatcgtcatcgtcgtggccggctcgctgtgggtgatgcacaacgccgatatcaacatgatgccgaccgacatgtccatcgaacgggcccgggcaaaagactagcgctcgcgcgcaaggaggctttccaccatgtatgtctatgacgccattgaccagaagctcgtcgacgaacgggtcgtgcagttcgccgaccagacccgccgcttcctgggcggccagctcaccgaggatgagttccgcgtgctgcggctgcagaacggcctctatatccagcgccatgcgccgatgctgcgcgtggcgattccgtacggcatgctggcgtcccggcaattgcgcaagctcgcggagatcgcgcgccgctgggatcgcggctacgggcatttcagcacgcgccagaacctgcagttcaactggccgcggctcgaggatgcccctgccattctcgccgagctggccacggtgcagatgcacgcgatccagaccagcggcaactgcatccgcaataccaccaccgaccactttgccggcattgctcccgacgaactggtgaaccccctggtgtggtgcgagatcgtcaggcaatggtcgatgctgcatcccgagttcgccttcctgccgcgcaagttcaagattgccatcagtggcgcgcggacggaccgggccgcggtcggcgtccatgacatcgggctccaggcggttgaacaggacggccaggccggcttcaaggtctgggtcggtggcggcatgggccgcacgccgatggtgggcaagctgatcaaccccttcgtcccctggcaggacctgctgacctacctgcaggccacactgcgcgtctacaacctgcacggccgccgcgacaacaagtacaaggcgcgcatcaagatcctggtaaaggacctgaccccggaggtgttccgggcgcaggtggacgagcagtggcaacgcatccgcgggggcccggacaccgtgtccgagggctttgtcgcgtccatcgccgagcgcttcacgatcccgccgtatgaagccgcggccgccgacgagccggaccagtcagccgacctggccaagaccgaccgcgccttccgcctctggctgaaaagcaatgtgcaccggcaccgggtgcctggctacgccgccgtcacggcatcgctgaaagccgcgggccaggcgcccggcgacatcactgccgagcagatggaaatcatggccgacctggccgagcgccacggcttcggcgagctgcgcgtgtcgcatgagcagaacctgatcctcgccgatgtccgccgcagcgggctgcacgccttgtggcaggcgctggacgccgccgggctggccacgccaaacgtcggcctgatcaccaacatcatcgcctgccccgggggcgacttctgctcgctggccaatgcggtctcgatcccgcttgcgcaggccatccaggagcgcttcgacgacctcgaccatgtgcacgacatcggcgaactggacctgaacatctccggctgcatcaactcctgcggccaccaccatatcggccacatcggcatcctcggcgtcgacaaggccggcgaggcctggtaccagatcaccatcggcggccggcagaacggcgccgacggcctgggccgccccgatggcgtggcggccggcggcgcggccatcggccgcatcatcgggccgtcctttgcacaggagcaggttccggatgtggtggagcggctgatcgagacctatttgctgcatcgggacagcgaagccgaacgctttgtcgacgtggttggccgaatcggcatagaacccttccagcgcgccgtgtacccggactctgacagcggcgcgcggcgagctcgccaggaggcggtgaatgcctgaccatgaccatttagccgggcaggaccggcgcaacgtcatccgtgacggacaactggtcgcggatagctggctcgctcacatcggggatgcgcaagacgccgacaacacctgcccccccgacgagcccggctacctggtgacactggagaactggaccacccaccgccagcggtatcggcttcgacagtatccgctcgcggtctacctgtcgccggatgcggagccccagaccctgctggaacccggtgccacggccgttgatccgacaggcatcgcgatgattgccatcgatttcccggtctacacggatggtcgtggctattcgatcgcacagctgctccggcaccagctaggctggaccggagagctgcgcgccgtgggtgacgtgatgatcgacaccgtgcactacctggcacgttgcggcttcaacagctttgcgctcaagcccgggcacgacccggcagcggcattgcgcgcgctggccacgttctcgtcgtcgtaccagcgcagctatggacccgcaagccgatagcaagcgccgccgggcgccgatacgaaacatacccgtccagccctgcgcaaggcctgatagcttgtggtccgctgtcgccgaactctcgggcaagcagctgcatacgattatcgatatcgcacagcgctcaccaaaggcgacgacggatatggcttcgttcagggcgcgcattctcggtgttttcggaaacgtcgccggttttgacatcacaccgccttcggagtccatgctgcaagagctctgggaaaggtatcgctcgacactctcctcgttctagcagcgcggatcactcgaaagatcggcccggcccggagcgatgccgcacgttcaaaaattggcttcgatggccttcctggcgccctctggcacctcgttcggtatgacgcggtgcgcaagtatggcgtagctccgggcagccgccactgcagtgggattcacaagccgcttcgggccgcccagccacgcaaaatgatcttttccatcgtcactactgaaccacgcgaagtcgccgatggcgtccaggccgcgcttcaccagcttcagcagcgccagggcttcctctgaaacacccaggtgccgccctgtgtcatgaatgaccgtggccaggttgcggagcttgttggtcggggtggcctcgtcgtttgcctcgtcaggtaacagctcgacgaccagaatccccctgtgcgcggtgatgcgtgcgtgctgcatggttcctcccaactgatggctgccggcttgcgaccttacgcattgacctagcaagttcttggccaggtcatgccaaaagtgcagcttacaggccgcttatgacactgcgccctcatttggccgcgggagcggcagtgggcgccggtgcgccgccaaatggtctagtgttggtaccgccccgccacttccagtggactgttggaccgcaggcgactcgcgaggcccaatcgcacctgcacaatccgccactcccatggcaagacgctgccctatccttgctatgggaggctcagcgcggcagtccagccgtcgagcacaggaataggctgttggtcaatccaggcgggagggcggcatgcgcgcgttggtcttctgctctgtgcagttcctgttggcggtgacatggaccctctatgtggccttcctgccccagctggccgcgcaggccggcatcgcgcgcgcgcacgtcgccttgatcctgctgatggaccagttgatctttgtcgccatggatttcacggtgggcgtcgcggccgaccgtgtcgccaacgcgatgcgcaggctgggaggctggatgctggggctgtcggtcatctccgcactggctttcgtgctgctgccccgggcaacttcaccagcgctgctgctgggcctgaccgcgctctgggcagccacctcttcggcgttgcgggcgccgcccatggtaatcattgcccggcggctgccggcgaccgcgtcgtcattcctggtgggatgctcgctgctcggcgtcggccttgccggagccgtggcgccgctgctgacggcccggctgcgcgatgcgtcgcccatgctgccgttcctggccgcaagcgtggggctggtggtggccgtggccgcgctgcgatggatcgaatccggcccggcgcgccacgatgccgacgccgcgccggcagccggcgttgcgctcaagcgcgtctggctgctgtttgccgcggtctgggtgcttgcgctcggcttccagatccacaccaccgtcaactccgcgccggcgtacctgcgctttgtcacggctgccgagctggagcgcgtgacgccggtgttctggattagcttcgcgctgggcacgctgctgcccgcgacgtcgttgctgcggcgctatccgccctatacgctgctgttgaccgccgcggcccttggcgccctgtcgttgttcggcttcacagttgcgggctcgctcggggccatcctcgccgtgcagtgtcttgccggcggcctgtggggaatcatgttcgccgcgacggccagtgcggcgctcgacgccggtcacgtcggccgcgaagggatgtacaccgggctggtatttgccgctttggcggttgccgcgttcatgcgcattgccctggtgtcatcgggcgccagcaagacccccgtgctggcaaacctgctgccatggcttccggccgtggcctggagtgccggtgccttgctgctggcggctttcctgtcggggaacctgagctgcctgatgacgcgcagacaggtgctgcacccgcatccgtgaactgatcccttgagctatatccgacctactcggaaattggagactactgtcctgcttaaggctgactgagatcaatcggccttcgaacaagccctgtgcttgcccgttcccaaggagcgcgccatgtccacccaacttgccgtatggcatgccgagcacctcaatttctctcgtctgctcgacctactggaagagcaggtatgcgtattccaccagggagggagacgctataagttcgcgagcggcgctggaggcagccgcagccatgtaccttgtgtactgccgtaaccatctctctaccgaggagagacaggcaatgccgcgcgctgcccagttgctgacacaagaggactgggcagctattgccgacgcggctcccgaaagctctgatcctatgttcggggaagaagtgcaagcgcgcttcgcgacactacgcaagcagatcgcggctgaggcgagcttatccacgcagcagcagtgctgcgcctaatccgaaaacaagccgacgaactggtcgcgcagccactgattcgccggatcgcgatgataccgggcatgccagaacaggttgatctggatttccggcaacgcgaacggatgcttgacgtacctgagcccgaagtacctggcgcatcgctccgcaaacgtcaaggtcaccgtggcgaccaggtcggtggtggcaatgatgtccgccagtgcgacgaaatgggggacacgcagccggatcttgcgctgtacgccgtgctgggcgaggatctcgtcgacccgggcatgccccgtccccgccgccgtgaccacgatgtgctccgccgcctcgaagtcgcgcatgctgaccgtcttcttgtccatggcatgaccgggccggaacaggcaaacgtatcgctggcgaaatagccgccgttgaaagaacgtcgtgccgagttcaggaagatggccaaccgccaggtcgatctttccctggctcatctccgccgccaggtccactgccgtattacgcactgtcgttaccgtgacacccggggcgcggtcgccaagcgcgcccattagcggcgggatgaagtgcacctcgccgatatccgtcatggcgatccggaatgcgcgcacgctgcgcagcggatcgaacgacaccttgtggctgagcgccgtctgcagcgactccagcgcataggcaaccggttccgccagttcctcggcaaggggtgtcggcagcatgcccttgctgcttcgtacaaacagcgggtcgccgaacaaggtgcgcaagcgggccagcgcattgctgaccgcgggctggctcagattcagggtcttcgcggcgccggaaacggtgccctgccgcagcaggttatcgaacacgaccagcaggttcagatcgacgtccttgagctccatggtgccgtctattattgattttatgaatgttcattatagccagaattctattggttaattttcctccgtgcaccatgatccttcccatacgaagagacatagccggagacaagcatggcaatccccccgcaagccggcccggtgtgggccgacgacagcatcagccgcatcccgttccgcgtgtatacggatgcacagctataccagcgtgaactcgaacgctgcttctaccgcggtcattggaactacgtcgggctcgaggcggagatcccgaatcccggtgacttcaagcgcaccacgcttggcgagcgttccgtgatcctggtgcgcgaccaggacggcgagatcaacgtcgtcgaaaacgtgtgcgcccatcgcggcatgaagttctgccgggaacgcagcggcaaccggaaggacttccactgcccctaccaccagtggaactatgacctgaagggcaacctgcaaggcgtgccgctgcgtcgcggggtcaagcaggacggcaaggtcaatggcggcatgcccgccgacttcaggccgcaggagcacgggctcacgcaactgaaggtcgcgacacgcggtggtgtcgtgtttgcctcgttcgaccatgaggttccatcactcgaggaatacctcgggccggatatcctcggctacttcgaccggctcttcaacggccgcaagctgaaggtcctcggctacaacaagcagcgcattccgggcaactggaagctcatgcaggagaacatcaaggacccctaccaccccggcctgctgcatacctggtttgtcaccttcggcctctggcgcgccgacaacaaggcacgcctggtgatggacccgcacttccggcatgccgccatggtgtcgacccgcggccagggcggcaagagcgacgtgacctccggtgtatccagcttcaaggaccagatggcgctgcacgacgaccgcgtcctcgacatcgtccacgagccgtggtggggagagcctaccgccgtgatgatgacggtgttcccgagcgtgatcttccagcagcaggtcaactcggtctccacgcgccatatccagccccatggcccggattccttcgatttcgtctggacgcacttcggcttcgaggacgacaccgaggagatgacgcggcgccgcctgcgccaggccaatctcttcggccccgccggcttcgtgtcggccgacgatggcgaagccatcgaatgctcgcaggaaggcttctcccagaaaccctggcatcgcgtgctcgccgaactgggcggcaagaccgcggagaacacggaccacatggtgaccgaaaccctgatccgcggcatgtacgcctattggcgcaagatgatggaggtctgacgccatggacttcactgactactacgccctgctctccctgttcgccgactacaccggcgccgtggacaacggcgactgggaccgctggccggaattcttcaccgaagactgcctctaccgggtccagccccgcgagaaccacgagcgtggcctgccgctggcaacgctctcgctcgaaagcaagggcatgctcaaggaccgcatctacggcattcgcgagaccctgttccacgatccctactaccagcgccacattgtcggcgcgccgctgatcagggaggccgacggcgacaggatcgtggccgagaccaactacgcggtgctgcgcaccaagccggaccagatgaccgatgtctacaacgttggccgctacctcgacaccgtcgtccggacgccggcgggcttgcgcttcgcctcgcgcatctgcgtattcgatagcgagatgatccccaactcgctgatctaccccatctagcaggagtgattcatgaccgaaacctggatcgaggcagcgctgctgtccgacgtcccgcaggacgatgtcatcgccgtggccgtgcaaggccaggagatcgccttgtacggcgtggacggcgacgtctacgcgaccgacaacatctgcacccatggtcatgcgcgcctgtgcgaaggcttcctggagggacatgagatcgagtgcccgcttcaccagggcaggttcgatatccgcgacggcgctgcgaagtgcgccccgctgaccgagaacattcgcacctacccggtccggatcgacggcgacaaggtgtacctcgatctcggctgagaggtcgcgtcaccaaccagaggagacagccatggattccgagcgctcagacaccgcgactcccatttcgccaaccgccaccatcgtcatcgtcggtgccggccaggctggcggctgggccgcccagacgctgcgcaacgagggcttcaccggtcggctcgtgctgatcggggacgaggcccatccaccgcatgagcggccgccgttatccaaggccgtgctggccggcgaggccgcacccgccagcacgtggctgctcaagcctgaagcgttcgctgcgctcgggctggagtggtggctggacacgcgcgtcacccgcatagaccgggccgcgaagcgcctggagatagccaacggagagatgctgccttacgacaagctgatcctgtgcaccggcggcagggcccgcgcgctcaccgttccgggcgtcgacacggctgccgtgcatacattgcgcacgattggcgatgccctggcgctggcgccggcgttgcggcccgggcgcagcatcgtggtgatcggcggcggctggatcggcctcgaagtcgccgccacggcacgccgcaaaggtgccgaggtcaccgtgctcgaagcccagagccggctgtgcgagcgcaccgtgccgccggaagtctcggagcacctgctcgggctgcatgcctcgcatggcacccgtgtcatgctcggcgccaatatcgccggcatcgcccccggtaccggcggccggtccgtcgtgaagctggccgatggcagcacgctggcttgccacgccatcgttgcgggtgtcggtctcgtgccgaacgacgagcttgcctgggaagccggattggagtgcgacggcggcgtggtcgtcgacgcgggttgccgcacgtccgaccccgacatcttcgccgcgggcgacgtcgcggtcacgcccaacccgtgggccggccggcgcctgcggctggaatcctggcagaacgcccaggaacagggcattgccgccgcgcgcgcggcgctcggtctcgcggtcgactatcagccgctgccttggttctggtcagaccagtacggcatgaacctgcagatccatggcatcccccttccctcgcaccgcgtggtggcgcgcggcacgcccggcgcggacagcttcgtgctgttctacctcgacggcgacgtggtcaaggccacgctagggtccaacgccgcgcgcgacctgcgcttcgcgcgccgccacatcgagcagtgcaagccggtcgatgccagccgcctggccgacccgaacgtgccgatgtccaggcagtaagcccagccataagaacagaccgaccggagacaagcccccatgcagcaaatcgacatccacaagctggccgacacggcccgcttcaaccgcttccatgcgctcgtgctgttctggtgcgcactcatcatcatcttcgacggctatgacctcgcggtcgtgggcatcgcgctgccttcgatcatgaaggacctcggcgtcgccccgacccaggcggggctcatggtcagctccgcgctgttcggcatggtgttcggcgcgatcttcctcggcaccatggccgacaggatcggccgccgctggacgatcgcgatctgcgtcgccctgttcagcgtcttcaccgctgcggccgggctggtcaaggacccgctgctgttcagcatggcccgcttcctggccgggctcggcatcggcggcgtgatgccgaatgtggtcgcgcaaatgaccgagtacgcgccgaagaaaatccgggcgaccctggtcaccgtgatgttcagcggctatgccgtgggcggggtcctggcggcgctgctcggcaagagcctgatcgaggcctacggctggcagtcggtcttcctggcggccggcctgcccgtgctcctcattcctgtcattctcgggtcgctgccagaatcgatgccgttcctgctggccaggggcgaccacgaagcgttgcggcgcatcgtctccaggcttgcgccggagcaacggtggtcggccaccgaccgcttcgccgtgccggcgcaggacaaggccgccagcgcgccaatccggcacctgttccacgagggccgtggcttcagcaccatcatgttctggatcgcgttcttcatgtgcctgttcatggtgtacgcgctcagttcatggctgaccaggctgatggcgggcgccggctacagcctgggttccgcgctgaccttcgtgctggtcctcaacctcggggcgatgatcggcgccgtgggcggcggctggctcgccgaccgctaccacatcaagtacgtgctcgccgccatgtacgcgctggccgcggtctcgatcacgctgctcggattcaggatgccgactgaactgctgttcgtcgtggtgggcctggccggtgcgtcgacgatcggcacgcagatcgtcgccaatgcctacaccgggcagttctacccgaccgccatccgttccaccggtcttggctgggccctgggcatcggccgcagcggggccatcctcgccccaatcgtcatcggggtactcgtcgccatggaactcccgctgcagcagaacttcatcgcgatcgccattccggcggtgattggcatgggcgcggtcctgctgatcgatcacaggcgctcggcatcggcccgctacgacgaaatgagcgccgggctgcctgcgtcgccggtcgggctgtccatcgcggaccggaactgattccccaggccggcgcggcccggcgggcagcgctccggggacaggcgcgggcacggctagaatgtattcatgggaaccacgtcgggatcactcccaggccccgaccccggttcagtcagaatcgaagaggttgtcgcgatgaaggcaagagcctcgatcattgcattcgtattggtgaccctggccactccgatggcgcacgcgggggtggccgaggacgcgcgcgggttcaagaacggcgtcaaatcggctggcaagcaggccgggcatgcggtgcgcgacggcgcgcatgccattggccgcggcgcgaaggcggccggccatgcgattgccgataccactaaacagggctatcgcgcgaccaagagggccgtgaagggtcacgagtaaggacttgtcctgcggagccggatcctgccgcgctcccttgctcctttacgccctcaggccgactgggaaggcatccgcggcacgaagcggcggcgctcgatctcgccaccccgggccaccagggtggtcgcctcgggaatttcctcccataccccctgcacctcgatcagcggctcggacagcaccaggaaggcgttgtcgccggcggcgatgatgcgcggatcgtccgggtaaagcgcgcgcaattgccggaacgaggtgctgtggaacagcgagcgcgagtccgtctcgctcgaatagcgcaccgccacgatctgctggccgtcggtcacgcagacggtcatgttgagcggaaactgcacatcgtaacggtggccaacgtcctcgatcagcccggccatctgttccagcgcgccgcccggatcgcgctccaggccgaaactcagggccaggaagaacatcacctcggagtcggtcgacccctcgatccagcggaacaggtgcggcgccacggccaacatcaggtcgcgccgcaacagcgggtattcgcggatcaggccgttgtggacgaacagccagcggccgaagcggaacggatggcagttggtctcctgcgtcggggtgccggtggctgcgcgcacgtgggcaacgaaaagtggcgctctcaccgcccgcgcggtctcgcgcaggttggtgtcgctccaggccgggtgcaggcagcggtagcggaacggcacctccgagtgacgtccataccacccgacgccgaacccgtcgccattggtcgtggtatgacccagccgcgaattcaggctctggtcgatcagcgagtgttccggctggaacagcaccgtttccagcggaacggatttgcccgagtaagccagccagcggcacatgatgctcctccttgaccggtgcggcccggtggcttccggcccacacttccagttgtaggacgacaacgcgcgaacgcaaagcacgcgcagctgtggcgcaccggctaccctcaactgtacgccggctccaccgggatacggcgagttgacgctgcgaagcagcaatggctgtagaatacgcgtcctccccgattccaatggtcacggcgtccgatatcggcccgcgccgcaccggtacctcacgagccttgacagcaggcccgatagcgcacgcacagcgtgcgcgctgctgtcgaaacgcgattcacgaaggaaacagtagtaaatgacaagcggcgtacaacgaacggcagctaaaacacgagaaacaggcgcaatcaaggaccctggccagaccagcgcagggtcgacggcgcagcctgatccatcgacggaagccgccgcgcgtagccagcaattgcgtgcgctgatccagctgggcaggcagcgcggctacctgacccacgcggatatcagcgaccacctgccggagaacttcactgacacggcggcgatggaaagcatcgtcagcacgttcgccgagatgggcgtgaagatctatgagcagacgccggatgccgagacgctgctcctgagcgatggcccggtggtggcctcggacgaccaggccgatgaagaggccgaggtagcgcttgcgactgtggactccgagttcggccggaccaccgacccggtgcgcatgtacatgcgcgaaatgagctcggcaacgctgctcacgcgcaagcaggaagtcgagatcgccaagcgcatcgaggaaggcctgaacaatatggtgcatgccatctcggcctgcccgttcaccatcgccgcgattctcgagctgtcgggcaaggtcgccagcaatgaaatcagcatcgacgacctggtcgatggcctgagcgacgagagtattgccgaagcagccgtggcggcggcagctgacgagaccgacgacagcgtcgatagtgccgacgaggccgatgacgattccgaagactccgacgacgaaggctcgacccagcaaagcaacgaaaaagccctggcccaactgcgtgaggaatgcctgaagcggttcgcgcgcgtcaccgcgcaattcgagctgatgtgccaggaaagcgccgcaaatggcgcgggctcggcagccttcctggccgcaagggatgcggtgcgcgaagaactgcgcacgatccgctttaccgcgaagaccatcgagcgcctgtgcgccaacgtccaggccatggtcgacgaggtgcgcacggtcgagcgccaggtggtccagctgctggtcgagcgctgcgggatggagcgcgaggaggtcatcgcccgcttccccggcaatgaaaccaacctggcctgggggcaggagctggtcgcccagtcccgtccgtacagcgcggcggtcgcgcgggccctgccggacctcgaggcgcaccagcaaaagctgatcgacatccaggcccgggcggcgctgtcgctgcccgacctgaagggcgtcaaccgcaagatgctggctgccgagcggcagatgcgccaggccaagcacgagatgacgcaggccaacctgcggctggtgatctcgattgccaagaagtacaccaaccgcgggatgctgttcctggatctgatccaggaaggcaacatcggcctgatgaaggcggtcgacaagttcgaatatcgccgcggctggaaattctccacctacgcgacgtggtgggtgcgccaggccgtgacgcgggcgattgccgaccaggcccgcaccatccgcgtcccggtgcacatgatcgagcagatcaacaagctcaatcgcctgtcgcgcgagatcatgcagcagaccggcaaggaacccgatccggcggtgctggccgagcgcctggacatgaccgaagacaaggttcgctcgatcatgaaaatcgcgaaagagccggtctcgatggaaaccccggtcggcgaggatggcgataccagcctgggcgacatgattgccgactcggacacggccacgcccgccgacgccgcattgcaggcgggcctgcgcgccgtcgtgcgcgaaatgctcgacgagctcacgccgcgtgaagccaaggtgctgcggatgcgctttggcatcgatatgtccaccgactacacgctggaagaagtcggcaagcagttcgatgtcacgcgcgagcggatccgccagattgaaagcaaggcaatgaagaagctgaggcatcccagccgggcagaccagctgatcacctatctgcgcgacgcctgatacttgccggcaacagccgcttggccgactgacacagagcagacaggagctttcggatgactgactcgaacctatctttcttcggcagggtctcgcttgccatgggcaccttcttcgccatccttggcaaccgcgaactcgcggccggtgtcaagcgcctgcgtgacggcgagggattcgccgcggcgccggcgcccgcggctgtatcagcacctgctcccgccccggtggcggaggctgccgcacccgtgctgaaggaagccagcccggtggcggcgctgcagttgctcggactgctccagcgcgatgcacgcttcatcgacttcgtcgaggaagatatcgcgcgctattccgacacggagatcggtgccgccgcgcgcctggtgcacgatggctgccgcggggtgctgcgcgagcacttcaccatccggccggtgcgcgaggaagccgagggcagccgtgtcacgctggccgacggcttcgatgccaccgccatccgcctgaccggcaacgtggtaggcagcgcgccgttccatggcagcatcagccaccgcggctggaaggtcgaggaagtccgcctgccgcgcgtggccgaacgccatgacgccaccgtgattgcccccgccgaggtggagctttgatgagcgaagcacgctatgccatcggcatcgacctgggcaccacccatggcgcggtctcctacgtcgacctggccgccagcgatggcgagaagaccagccagcgcgtcctgcccatcacgcagctgaccgcgccgggggccgtcgaagacctggacctgctgccctccttcctgtacctgccacacgccagcgaactcgccccgggcgacctggcgctgccgtggaacgccgcgcgcgacttcgccgtgggcgagctggcgcgcagccgcggcgcggccacgccgatccgcctggtgtcgagcgcgaagagctggctgtgccatcccggcatcgaccgccgcgcgccggtcctgcccaacgacgcaccgcccgaggtgacgcgcgtgtcgccgctggaggcttccgtgcgctatctcacgcacctgcgtgaagcctgggaccaggcccaccccgaagcgccgtttggcgagcaggacgtcaccgtgacgattcccgcatcgttcgacccggccgcacgggagctgacggccgaggcggccgccgcggccggctatgcccgcatgaccctgctcgaggaaccccaggccgcgctctatagctggatccagaaaagcggcggccaatggcgcaagcaggtcaaggtcggcgacatcatcctcgtcgtcgatgtgggtggcggcaccaccgacctttcgctgatcgccgtgatcgagcgcgaaggcaaccttgagctgcaccgtattgcggtcggcgaccatatcctgctcggcggcgacaacatggatctggcgctggcccacgtggtggcgcgcaagctggcggcccagggcacgcaggccgatccgtggcaactgcgcgcgctgacctatgcctgccgcgcggccaaggaaacgctgctgaccgacccggataccgataccgtgcccctggtcgtgcccagccgcggctccaggctgatcggcggctcgatccgcacggacctgacccgcgccgagctgacccagaccatcctggaaggcttcttcccgcaagtcgaggcctcggcccgcccggtgagccgcgcgcgcgccggcctgacgcagcttggcttgccctatgcgcaggatgcggccatcacgcggcacctggccgcgttcctgggccggcaggtggcggcgctggccgaaatcgaaggcttgcagagcgcacagccggaaggcgcgaccttgctgcacccgaccgccgtcctgttcaacggcggcgtgttcaagtccggcctgctggcggaccgcatcctgcagacgctgaacggctggctcgccgcggaaggcgcggcccctgcccgcctgcttgacggcgccgagctggacctggccgtggcacgcggcgccgcctattacggctacgtgcggcgcggcaagggggtgcggattcgtggcggcaccgcgcgcgcctactatatcgccgtggaatcgtcgatgcccgccgtgcctggcttcgaaccgccgatccaggccctgtgcgtggcgccgttcggcatggaggaaggcaccgaggccgcgctgccgccgcaggaattcggcctggtggtgggcgaacccgtgcacttccgcttcttcggctcgtcggtgcgccgccaggaccaggtcggcaccctgctggactactgggggccggaggaactgcaggagctggaagaaatccaggcgaccctgccggccgaaggccgcaccgcgggcgaagtggtaccggtcaggctgcatgcgcgggtgaccgaggccggcaccctggaactcgaagccgtgcccggcggcagcgctgagcgctggaaggtcgagttcgatgtgcgcggcagcgccgatgcctgagcaagcggccgggccggcgacgaagcaatacgtcgtcggcatcgacctcggcaccagcaacaccgtcgtcgcctacgcgaaggccgggtccgacgatatccgcgtcttcgatatcgaccagctggtcagcccgggcgaggtcgcggcccgtcccctgctgccctcggtgcgctaccacgcggcaccgggcgagctcagcggcgacgacctgcagctgccctggcaatccgccgccagcgccgccgcgcgccggaccgtgttcggccgcctggcggccacgctcggcgcgcaagtgcccggcaggctcgtagccagcgcaaagagctggctgtcgcatgcttcggtcgaccgcaccgcggccatcctgccttggggcgggaatgacgatctcgacaagatctcgcccgtcgtcgccagcgccagctacctgggctatgtatgcgcggcgtggaaccaccgttttcccgatgcgcggatcgaggaccaggacgtggtactcaccgtgcccgcctcgttcgacgagggcgcgcgcgcgctgacgcttgaggcggcgcgcctggccggtctgcccgcgctgcgcctgctcgaggagccgcaagccgcgctctacgactggctgttccatcatcgccagagcctggacaccgacctggcgcaaacccgcctggtgctgatctgcgacgtgggcggcggcaccaccgacctcaccctgatccgggtggacatgcaggacgggcagccgcagctgacccgcatcggcgtgggcaaccacctgatgctcggcggcgacaacatggatcttggcctggcgcatctggtcgaggcgcgcctcggggccggcggggccgcgcagccgcggctgtcggcggccggcctgtcgcagctggtcgcgcgctgccgcgccgccaaggaacagctgctcggcgcgcaggcgccggactcggtcgcggtgacgctgctgggcgcgggcgccaggctgatcggcggcgcacgctcggtggaagtgacgcggcaggaggtcgaacagctgatcgtcgacggcttcttccccaaggtgccggccagtgaaaggccggggcgcgcacggggcgcgattgtcgagttcggcctgccgtatgcgtccgaccccgccgtgacccggcacgttgcggcgttcctgagccagcacgcggcgcagtcgcgggcggcactggacgcaccacaggcgccggccgatgccttgccgatgcccgataccctgctcctcaacggcggcgtattcagggcgcaggcgctggccggccgcatcgccgacacgctgggcacgtggcgcggcgcgccgctgcaggtcctgcacaacgacaatcccgacgttgccgtggcccggggcgcggttgcgtatgcccgggcccgtgccgggcaggccccgcgcatcggcggcggctcgccgcgcagctactttctggtcctcgatgatggcgcgtcggggccgcaagggatctgcctgctgccgcgcggcactgaggaaggccacgagattcacctcagcgaccgcactttcgccttgcggctcggccatccggtgcaattccacctggcatcctccgtcgccgacacggcctatcagcccggtcagctgaccgacctgtcggcgggcgacttcatccgcctgccgccgatcgccaccgtcgtgccgccgcgcggcgccagcggcccgcgggaaacgccggtgcagatcaccgcctcgctgaccgaggtcggcacgctcgaggtccactgcatcgacatcgcggatgcctcgcagcgatggcgccttgagttccagttgcgtggcaatgacacccaggcggcaccagcgcccgatacggcacacccgtccctgccccaggccctggaggcgattgaccgcacctttggcgcgcgctcgcaggacgtcggccccaaggaggtcaagcgcctgcgtgcgcagctggaacagctgctgggtgcgcgcgagcaatgggacagcgccgtgctgcgcgagctgttcggcgccttctgggaacgcgcccggcgcaggcggcgcactgccgaccatgaacgcctgtggctgaacctggccggctattgcgtgcgcccgggattcggctatccgctcgacgaatggcgcgtcgggcaactctggtcgcagtacgaccagggcatccagtacgtcaacgaaagccagaactggtccgagtggtggacgctgtggcggcgcgcggcaggcgggctggacgaaagcgcgcaactgcgcctgctggaagacatggccttctacctgcagccacccggcagcacccgctacaagaagcccgccgggcccgccaggggcggctatgccgatatggtgcgccttgccggctcgctcgagcgcattcccgccgacgccaagatcgaactggccgaatggctgctggcccggctgcgcaagccatccgaaaacagccagggctggtgggccgtgggccgcatcggcgcgcgccggccgttctacggcagcgcgcacagcgtggtgccggccgggaccgccgcccaatgggtggacgcgatcctggccctcgactggaaaaaggtcgagccggcagcgttcgccgccgtgcagatcgcgcgcatgaccggcgatcgcagccgcgacctgcccgacgagatccgggcaaccgtggtgcgccggctggaagccgccaacgcgccgccaagctggattgccatggtgcgcgaagtggtggaactcaataccgcggacgaggggcgggtgtttggggaggcgctgcccgccgggctcaagttgatcgcggggtagcagaccagcgcgaagcgactggcaggcgcctcatttgccacttatctgcgccagccaggccgatgatctacgatgacggtaggctccttgcctgccccactcgtgaagccatcagcgccccgcccactcctcccaatcctggtcgccgccatcgcgctggccttgccctgctcgatcaccgccgccgacgacgcccttgccccgcagcgcgccgacatggtcagggagatcgccgcggtcgcggcagcggccgccgcccagagcggcaggcatgccatcgacccgcgcgtcatggccgtgatggggcaagtgcctcgccacgagtttgtgccggacgcgcagaagccgcacgcctatgagaaccggccgctgccgataggccatggccagaccatttcgcagccgtatatcgtcgccctgatgaccgacctgatgatggtcaagcctggcgacaccgtgttggaaatcggcaccggatccggctaccaggccgcggtgctgaccgggctggcgcgcgcggtctataccatcgagatcatcgagccgctgggacggcacgcctgcgaccgcctgaagcggctggcctaccggcaggtggcgtgcaaggtgggcgacggctactacggctgggacgaacacgcgccctatgacgccattgtcgtcaccgcggcggccagccacgtgccgccgccgctgatccggcaactgaagccaggcgggcgcatggtgatcccggtgggcgcccagttcctgacgcagtacctgctgctggtcgaaaagtccgaggacggcaccgtttccaccaggcagatcctgccggtcaggttcgtgccgctggttggcaagcactgaagcgcggcacatcagcccggccagctgacgccatgccacgccccccgctgttcgccctggccttgctctctgccgccgcgctgggctacgagatcctgctgatgcggctgctttccatcatccagtggcatcacttcgcctacatgatgatcagcgtggcactgctgggctatggcgcggcgggtgcgctggtggcgctggcgcagcgaacgctggtccgccatttcgtgccagtgttcgcgggcggggccctgctgttcggcgtcagcgcgatgggttgcttcgccctggctcagcacgtggcgttcaaccccctggagatcctgtgggagccatcgcagccgctgcgcctgttgctgatctacctgctgctgttcgtgccgttcttttgcgccgcgaccagtatctgcctgagcttttcccgcttcaccgggcaggttccgcgcatctacagcttcgatatccttggcgccgggctgggctgcctgggcatcatcgtggcgctgttcgcgctgcatccggtcgatgcgctgcggctggtcggcatggcaggcatggcggcggcggcgctggcatgcgtggaatgccgctggcaccggccctggctgccggcgctgctgctgttggcggcaatcgttccggccggcgtgccaggtgactggattgcgctgcggccgtccgagtacaaggagttgagccaggccctgcgcatcggcaacgcgcgcgtggtggcgcagcgctcgagtcccctcggcctggtcacggtggtcgagagcccttcgatcccgttgcggcacgcacccgggctgagcctgaatgccagccaggagccgccagcacaactggccgtatttaccgatggcgacgggctcagtgcgctcaatcgccatgacggccggcgcgaaccgcttgcctacctgggcgacctgacctctgccctgccctaccacttgctgcgcaatccgaaggtgctggtgctgggcagcggtgcgggggcggacgtgttgcaggcggtctatcaccaggccagcgcggtcgatgccgtggaactgaatccgcaggtgatcgacctggtgcagggccgcttcgctgcgttttccggcaagccgtacagtgccgccggcgtgcgtgtctttgccggcgaggcgcgcggcttcctggcggccagcacggcacgctacgacctgatccaggtggccctgctggattcattcagcacctcatcggccggactgtacgcgctctccgagagctatctctataccgttgaggccttccagggctacctgcgccatcttcggcccggcggcctgcttgcgatcacgcgctgggtcacgctgccgccgcgcgacatacccaaactgctcgccaccgccgtggccgccatggaaggcgcgggcgtgcccgatccgtcccggcggctggcactgatccgtggctggaagacggccacgctggtggtcaagaacggggaattcagtgcagcggaccttgccgccctcgccgacttctgccgcgcccgttccttcgacgtcgaatactatcccggcatccagcccggccaggcgaatcgctacaacgtgctggaccagccctacttcttcgacgccgcgcaggccctgctcggccccgaacacgaccggttcctgtcccgctacaagttcgatgtgcggcccgccaccgacgacaggccgtatttcttccatttcttcaaatggcgcacgctgcctgaactgctgtcgctcaaggcgcagggtggcctgcccttgctggaatggggctatccggtgctggtggcgacgctgctgcaggccaccgccctggcatggctgctgatcgtggtcccgctctggattctgcggcggcgcccccggccgcagcccgccgcggggcctggcggcaatggcgcagccgtgcggcgcttgcccgaatggcgagccggcttctacttcctcgcggtcggcctcggcttcatgttcgtggagatcgcctttatccagaaattcatcctgttcctgagccacccgctctacgcggtcgcggtggtgctgtgcgcctttctctgctttgcgggactgggtagccgatacgcccagcgcatgcccgcgcgcgctggcgatgaccgcggccggcggcaggcggcgctggccgtcaacggcatctgcgtggccgcgctggtctacctggcggcgctgccgacggtgttcaggctgctgatcgggttgccggacccggccaggataggtgtctcagtgctgctgatcgcgccgctggcgtttctgatgggaatgccgttcccgctcggcctggcccggatcgcggcgcgcgacgaaacgctggtgccctgggcatggggcatcaacgcctgcgcctcggtggtggcggcggtccttgccacgctggtcgcgatccatgtcggattcaccgcggtggtgctgctggcgctgctcctgtacgctgccgcggcgcttgcgtgcccatgaaccggggccgggatcgatctcgcatgccatggctgcgggtcaccccgtgctaggatgaatgcccgcccggcagaaagacgcccaatcggcccatgaccaccctctacacaaccctcggcgtggcaccggacgccaccctggacgagatcaagcgcgcctaccgccgcgccgcgatgaagtggcaccccgaccgcaaccttggccgcgagactgaggcgcatgcggcattccaggaaatccgcgacgcctacaccattctctccgatgccgggcagcgccagatctacgacgaggtattcgagcgggagatgcggcgctggcaggccgagcgcgaggcccaggaagagcaggagcgcgaggcgcaacgcgagagccagcgcatcgcgcaggaacactacgagaaaatgctcggtatcgcgatgcgctttgccgacgacggccacaaccgcgacgtcatcttcggcgtgctgctcggccgcgactgcgaggcggaactggcgtcacgcatcgcggacagcatatgggcgctgcaggagtcgcggcgggcaagtgcgcgggacgcgcacgcgccggacaccgaggccgcccaggcgcccgacggggcggcagcgtcaaaccccgacgaggaaacgcggcccaggcgtcatgccggcgccttcgattcgttctggcacggcttgttcggcatccgctcctagatgtcgggggcgaccaggagcccgcttttcaccgtatggatcagcgcaaggcgatcttcaaccgccttgcgcaggacttcgcgtcccctgaacggatccgtcaggtaactggcgtactggcttgcccgaatctgcaccttgagatgcatcgtcgtcggtccactctccggccatgtcaccaggaacgccggatggctgtccgcgcactcaacgaaagcagcgtcaggggacgggaaacaggagtcggcgccctgggcaaggaactgtagatccttgtccttgaactcgtaggttgccattgcttactcccatcgcgcgaagccggcccctcagtgaatctgcatcccgcgcatggcatgaatccggccatgatgctgcgtcaacgcctcatactggcgctgcagcgccgcgctggcctctggcggcagcggcttcatcatgacggactgatactcgcgcctggcggcatcttcctcgtgctcgcacatgcccagcacggcgtcgtcgttgttcggcgacagcatgtggcggaatgccatccagcggcggtacagcatgccattcatgctgccccggtcagctggcgcgccgcccatggcgctgaccatcgactgcagttccttcaccgacgcccggtacgattccgcggtgctggtcagaatgtcgcgcagcgctgcatcgcgcacttcgctggctccgctcatgcaggccagttcgctgtccttgccagcctcgatcagctggttcagcgccaagacagcttgttgctggttgttgcccatggaattctcccaatttgcatgccagcgatgcgcaacttcggcgcaagtcgccaggtctcgccaacggacggaccgccacggcgcaaccggccgcgaggggaacgtcggagacgccatcaacatgaatcagccggttcgcgccgggccccatctgcctgcccgttcagaggcaaggcgtgattccatgataggagatggctgaacctcgcttcagcccttgcccaggattgccattgccttgttcgcatcgtcgagcgagtccaccgacacgtacgcgacaaactgtatcccgatgacggaggcagagaatccgcgcaggttgattccgccttccgccagctttcgggtcagttccgccacgatgccgggccggtccccgcccatgattcgcaccgaatgcaggctgtgcgtgacgttgaagccgacctgggcagcggcacggatttccctgtcattctgcagcggtgtcacgaacacgacacccttgccggggtcctccggcgtgcggcgcgcaatcgcgaattgcaggtccgcaccggcatcgcgcaaggtctccagtacctcggcgaggccgccgggacggtccggtatggttgccgcccacacgtccacgcgttccacgagaagatcgttggtcattgctcattcctccaatgccctcctacgaatctagctcatggcggccgccaggcaagctccgggctcggcggacagcggcagggcgaattcctggaaactccccgtgcccggacttaatatggactagtcgtttcaggcagctatcgcaggatagtggcaccgaccatccctggatggatgccatgaaagtgaagggggatcgtcatgtctgaaggcaaagcgccacgccatgctgcccagcaggaattggccgatgtgtccgaggccgaaatcgcggtccattggcccgaggaggactatgtcccgccggccggccagttcattgcgcaggccaatctgaccgatccccatattttcgagcgcttctccctcgaacgtttccccgagtgcttcaaggagttcgcagacctgctggactggtacaaatactgggaaacgaccctggataccagcaacccgcctttctggcgctggttcgtcggcggcaggatcaacgcctgccacaattgcgtggatcgccacctcgctgcatacaggaacaagaccgcgattcatttcgtgcccgagccggaggatgaggcggtgcatcacctcacctaccaggagctcttcgttcgcgtcaatgagctggccgccctgctgcgcgagttctgcggcctgaaggccggcgaccgcgtcacgctgcatatgccgatggtggccgaactgcccatcaccatgctcgcctgcgcccgcatcggcgtgattcattcgcaggtattcagcggcttcagcggcaaggcctgcgccgagcgcatcgcggactccgagagccggctgctgatcaccatggacgcctatcaccgcggcggtgaattgctcgatcacaaggaaaaggccgacatcgccgtggcagaagccgccagcgccggtcagcaggtcgagaaggtcctgatctggcagcgctacccgggcaagtattccagtgccgccctactggtgaagggccgcgatgtcattctcaatgacgtgctcgccgggttccgcggcaggcgtgtcgagcccgagccgatgccggcggaggcgccgctgttcctgatgtacacgagcggcaccacgggccggcccaagggctgccagcattccactggcggctatctgtcctatgtggcgtggacctctaagtacatccaggatatccaccccgaggacgtctactggtgcatggccgatattggctggatcaccgggcattcctacatcgtctatggcccgctcgcgctcgccgcttcgtctgtcgtctatgaaggcgtgccgacctggcccgacgccggccggccctggcgtattgcggaaagccttggcgtcaatatcttccacacctcgcccaccgcaatccgcgcgctgcggcgcaacgggcccgacgagccggcgaagtacgactgccatttcaagcacatgaccacggtgggcgagccgatcgagcccgaagtctggaagtggtaccaccgtgaagtcggcaaaggcgaggcggtgatcgtggacacctggtggcaaaccgagaatggcggcttcctctgcagcacgctgccgggcatccacccgatgaagcccggcagcactggcccgggaatcccgggcattcatccggtgatctttgacgaggaaggcaatgaggtcccggccggctcgggcaaggcgggcaacatctgcatccgcaatccctggccgggcatattccagaccgtctggaaggatccggaccgctacgtgcgccagtactatgcgcgctattgcaagaatcccgacagcaaggactggcacgactggccgtatatggcgggcgatggcgcaatgcaggcggcggacggctactttcgcatccttggccgcatcgacgacgtgatcaatgtttccggccatcgcctcggcaccaaggagatcgaatccgcagcactgctggtgccggacgtcgccgaggcggcggtggtgccggtggccgacgaggtcaagggcaaggtgcctgatctctatgtatcgctcaagccgggactgtcgccctccatcaagatcgcgaacaaggtctcggccgcggtggtatcccagattggcgcgattgcgcgtccgcatcgggtcgtgatcgtccccgacatgcccaagacacgctcgggcaagatcatgcgccgcgtgctggcggcgatctccaaccaccaggagcctggcgacgtatccacgcttgccaatccggaggtcgtcgagaagatcagggagctggcgacataggacggcacgccgctcacttccgctcatcggcagcccctgccccgagcgcctcgagcagcggccgcaaggcatcgagctccgcgccaaagccgctccagtcccccgccttcaaacgctcgacggcgcggtcatagtgcgcgagtgcttcgcgcgcgcgggcgttcgctgcgccctgcgccggaatcgccgccggcgcggattccttgaacagggccgcaagcgctgcgcccagggtgtcctccatgaccacgcgatcgccataggcggcgatcacccgcttgagttcgggcaactggccggactccgcacgcaggtagagcggcgagacatagaggatggagttctcgatcggcacgacctgcagatggccgcggatgacgcgcgagcccatctggttccacagcgaaatctgctgcgagatctcggtattctgctggatgcgcgcctcgatctggaacggcccgtagaccagcttttccttggggaaggtgtaggcgacgagcttgccgtagttggggggatcggagcgcgcagccagccaggcgatcatgttctcgcgctggctcggcaccatcggcagcatcaggacgaactcggcgcgcggttcgtccggcagccgcaggatcatgtagtagggcatcatccgcgcggcgggcgtgttccctgtgctcatgccggtcagctggcgaggaaactcccacagatcctcgcggttatagaagacttctgccgcttccatgtggtaggcgcggtagatccgcgcctggatcaggaacaggtcctcagggtagcggatatgccgctgcaggtcctgcgacatggcgcccagcggcctgaacatgcccgggaagatgcgctggtacacctgcacgatcggatcggccgggtcgctggtgtagaagtcgaccgtgccgttgtacgcatcgatcacgaccttgacggcgttgcggatgtagttggcgccgccaccggtgccgggctgcgaataagggaaccagcggctggtagtgtaggcgtcctggatccagtagaggcgaccatcgctcacgaccacataggggtcatggtcgaggctgaggaacggcgcaatcgtgcgcacgcggttccggatattgcgatggagcaggatgcggctttcctgcgtgatgtagccgctcagcaggatattgggatcgccgagatgccaggcgaacagggtccggcgcgcaatgccgccgattccgatgccgtcgcgcccgcgataggccgtatagacgttgtccttgcccttggggtagtcgaactcgggcacgctgcctttgacgatgacatagcctttgccgccttcaccgaaatagaggcgcggctcctggatgaccgggccgccgtcggagagcgggggaatgtcatgcagatagagcgagggcaggccttcggcggatttctcggtgaccggcgacatcaccacgccattgccatgggtgaacaacagatgcaggttcacccaggtctgggcattggccggaatcagtgccggctcaagctcccgcgccgacagcatgacctgctggtagccagcgccgagctggtagcggtcgatgtccgtcgcgaggaacttgtaataggtcctgatctcctgcagctgcgcataggtatcgcgcagcggctgcaggtcccacaggcggatgttgtcgatggtcggccgattggcctggagcgcggcgagattcaggttctgttcgaccggaaacggctttacctcgatctgcgtcaagccataggcctcgcgcgtcagcgcaatattgtgttggagatacggtgtctcgagttgcagctcgttcggcttgacatagaaacgctggaacagtgccggccagatcgtgccgagcacgattgcgctaccgaccaccagcagcgccgcggccgcaggcacccggtagtcccgccagcgcatattggcccacgaagcggcggcagccgcggcagccaggccgacttgcagccacaggaccggcagcccgacatggacatcggtatagctcgcgccgaccacgacgccgttgtcgccgtagagcagcatgaagcggtcgagccagtaggaccacgcctgcagcgcgaagaacaagccgagcaatgccgatccatgggtagcggccgccggcgaaagcccgcgcggcgaccggaccagcgcgatgtcgccgcgcaagccatagaccacgccggcaagcactgcgctgcagcccagcagcagaagcagccagttcctcagtgcaagatacgccggcagcgtgaagaagtagaaaccgatgtccttggcgaagatcggatcggtcttgccgaaaggcacctgatgaaaatagcgcagcgcaatggcccagctcgacagttcaccgacggccatgagcagccccaccaggacggcgacgccggcaatggcggcgcgccaggggacgcgcgccgcaatctcgccaaccggctggcccaggacctccggcctccaggcctgcgcctggctcgcgctgcggtgcgccagccagcccgatagccagagcgcgcctgccgaaacggcgaatacggcaaggaacagcagcgcctgggtgaggaagatcgtgcggaaaaccccggcgtagccaaccgaggcaaaccacatccagtcaacaacgaggccggtgacgcgactgacggcgatcagcgcgacgatgacggcaacaacccaggtcgcaaggcgtcccaggcgcgtggcgtccctcgctggcgagcgcatcgatcatgctcctttgccgcaccgtcgtccgtgacccggctactcgggctgcctgcccatatcagcatatatgcgttcgctgcacagcgcacggggtacgccaccctggcccggccgtggcgtcgttggcgagcacccattcaccctgcccggcctgatgtgagcatatgattctcaaaattcaaccaatccaggaatagaattacaatctccggcgacattgaacgacaattcgcatgcctgtgctccggcccgcaaatatcatggacacgtacccagaacaagaccaaggtgcctgccatgccgaccggatctcccctgactgccgcccctccggcaactctcccgcatctgcccccgccagccgcgccgctcgaccagctggcgctcaacctcgaggccaccttcgcccacagcgcgcgcatggtggccggccacatcgccacgcacctgccggacaccgacacgctgcttgcaacactgccgccaggcgccctgctcggcaagccggattcctatgcccgccacctggtccatgccgacccgctggagcgcttctcggcgatggtgctggtctggcgcccgggccaggccagccccgtgcacggccatcgcacctggtgtgcctaccgcgtgctgcgcggcacgctaagcgagcagcactaccggtgggatcccgccagccggcaggcgcgccatgccaacaccgtcgcgcgcacggccggcgataccttcagcgtgccggccgggctgcagcatatccatgcgctgggcaatgccagcgacgagatcgccgtgtccctgcacctctatggcgtgcaccgcgaccacattgccaccggcgtgaacctgctggtgccgaccgccgacgcctaggttttgccgcgcgtagccgcgccgcatgcgggcgccggcccaccctcacctgaaccgctacgcgccatggaccgctacgacaaacagattctcgccatcctgcaggaagacgccaccgtgccggtggcagagatcggcgaacgcgtcggcctgacctcgacgccatgctggcgccggatccagcggctggaagacgccggcctgatccgcaaacgcgtggcactgctcgacgccgacaagctcaatgccggggtcacggtctttgtctcggtccgcaccagccagcacaacgtgaaatggctggcgcagttccacgggctggtggcatcgatcccggaagtgaccgagttctaccgcatggccggcgatacggactacctgctgcgcgtggtggtgccggatattgccgcctacgaccgcgtctacaagaagctgatccagggcgccgagctggccgacgtcagttccagctttgcgatggagcagatcaagtacaccacggcgctgccgctcgattatgcgtaggccggcaccggccagctaagccacgttcgcgctgccaccgccgattagcgtggcaccgcaccgggtgcggtccccatgcagtgctgcgggttgcccatcgacatccatgccggaactcgcgtcaacgaccggctacgttgtacatcgcaggcagtgtgaaaggcttgtgtcactgctcggtccaacgcgcctggtcccagttgctggcaaagtaatgaagtatttcgcgccatgcgaagaggcccgcatgctcgtggaggtagtcaagctcagcggcttccaggcggtcgatgggaagcccactcgcccaggcatgaatcccagtatcatccgtcccccaggggttggtgagggtaactccctgagcaagactcttagtgccgacgtatccgagggcgttgccatcgggcttgtttcgttggctcgcattgtcagttcctttgactggatgctgatgtttccttcgcttcattcgcaacttcctccacgtcccatgacttagacatggtggttgccgtcttcaatgccaggcctggcatccgggccgttcggcacaccgatgaactcgtcggcatggggacgcgcataagggtcgttgggtgtgggcctgcacgccgcctcaatctcgggaggccacacgggatcgctgcaagttaccagcgtgagccatcggaatgtcgcatccagcaagatcatcggcaggaagatcagatcaccagcagacctgaggtcgcccctgcagatcttgaagccctcccaaaagccctctcgtggagcccaaaaaaacttcggttcaggcaggttggcgggaccgtcttgcatataacgtcggtagtattcccactgctgctgggcctgttccagcatgaacatctgctgcccgagaacgaaggcacgaaccacattaccgtccgcgtccaacttgtaatggcgtatgtcatacatctcatagctacgcgacaagccacccatcttgctgacgcccacgcagaagaactcttcgttgctccatggcacctcccatacaccgtcccccctttcgtgcgcatggcatagatgcggtgggttcttcggttcagccggatcggacgccgcttcaacgtgaagaggtttcgtcgcatcgactcagcggcgatgaagccaaagaagccggttgccgaagccatcatgatgagaccaatcaacatagcaggccagtaccccgggcgtcctaccacttctggtgagtcattcttgaacccggaaatgatcatcgcgaagccgaggaaactgagcgtcgcaaaagctaggcccaagacccaactctgaccgatcatctggattcttttttgcgactcatcgatgatttccaaacaggtcgaacctatgctgtagacgttgccgatttcatcggcgacttcgctggacggcctatcgatgtacaagcggtgctgcaactgccatgttccaggcggtcttcccttctcgcgaaagtaaagtggaatgcgttcatccttggtcgggagcttcatttcttggcatcctcgctaaccttaatgtcaagttgaagaaactctgcccattccttctccatggtggtgtagcgttcgccattcgcttgcttgctgaaatggcagcgcgtggcccatttgagcgtggccgggtcgtccaggatcgcgatcctcacgttcaccgcgaagagtacgaccaggagaggccaaaccggagtgccaacgagaattagttctgcagagattagcgcggcggtgctggtgtcgcttactcttgtccagcacggcttcatagggcgcccaagccgcatcgccggctgcctttttcctcgcaaggcgagtcgcttcacgctccgcatcttcgcgcttccatcgctcggccgtcgcttttccattaaacagaaccgacatgagttcgtaagccggaaatccatccggcgtggtcttcatgcgctcagcctcggccgccgcggcctccgcctcttttgtgtgctgcgcctcggcgctggcccggatgttcgattcaagacgatccagcaaaaagtccgtagactgatcccagatgaccgcgttgttcgccttcgggtgcatcttgggattggtcaggatgctcaggtcctcgataatcgccagcgggtcgttgcatgccagcatcagtgccttgccgggcgaaatctgctccatccgatccgcaagcatcgaaccgcttatggggccaatcggagcaatctcgcccaggttaatggcgggcatatcggcaatcccgcgcattgacacttgctcacattgcgtggctcgcgagcgacgccacggcgcgcacagaaacgcttgtgccagcgcttccgtccgctgacttggcgatcgcccggcggagaccggcggcgcctgagcgaaacgatatagcggcagtgtgtttgggccagatccggcaccggcggagcgccctcgcggacactaggaaaatgctgatcagtgagctggcgcaggtaatccagacctcggcattcgtaatgtgagagaagcaggccgcatttccctaagtgaacctgaacgccagcgaaataatgatcggccccagcaccggcagcagcacgttggcaatggcataggtaatggtgtaccccagcaactgcaccgagctgtggctggcggccaggatggcgctgatcgccggggtgctcacgtgctgcccggcaatcgcaccaaccagcagcgggccttcgatcttcaggagcttgtgaccgatccataaggacaggcacgccggccccagcgacacggccagcccgatcagcggcagcaccgcgccgtgctcgcggatcagcgagatcgcatccggcccggcggacaagccgacgcatgcgacaaagagcgccaggcccaggtccttcaggatctgcacgaccgacctcgggaaggtgccgagcgacggccttcttgaattgatccatccgaacaccaggccgctgagcagcgccccgcccccgctgccaagcgaaatatgcatgccgccagggctcaggctcagggttcccaccagcaggcccgccaggatgcccacgcacaggaagaccaggtcggtgacctcggttgccttcgcttccacgccgattccggcaatggcttcggacagcgacggctccaggccgacgatggtgaccacatcgccatgctgcagcggcgtggaacgcgtgatcggcagcgacatccccgagcgccgcacctgcaggatccagacttcacgcagacggcgtgcgccggccaggcgagccagttcgccgatggtcttgccgttgaccctgggcttgttcacgatgacctgcttttcgaccagctggatggcatcggtgtgggcctcgggcagcaggacttcgggcccgatcagggctgccgccttcagcaggttgctgcggatcccgaccatggccaggatatcgctggcctggaccttgtcgtcatcgccaagctcgatactggtgccgtcgcgcagcaccttgacgatagacgcccggccacccacctgttgctgcagctcgctcaccgtcattccggcggcctggtgcacggaataagcgcgcccgatcaggcgcggcagcgcgggttgcgtcgcgacgtcgtcctcggacgcggcatccatcttcgcggcgacttccctggcggccttgcgcagatcgatgcccagcaaggccggcgcgatctggctggtgaagaacacgatgctgatcaggccgaccaggtaggtcagcgtatatgccgtggcgatattggcctcgtagcggctcgcggtggcggcgtccaggccgaggtgcttcagcgcctcggcggcggtgccgaccacggccgattccgtcgccgcacccgcggccaggccggcggcggtgccgggatcgaagcccaggtaggccgccgcaccgacggcgatggcgagcacgacgatggcttccaccaccggcaggagcatatagcgcaggctcgaccggttcaggttggcaaagaactgcggcccgccggagtagcccatggcgaagataaacaacgcgaaggccatgtccttgagctcgccgtgcatctggcaaccggtctgccccatgaacagcgcgacgaccagcgtgccgcagactccccctagctggatcgggcccacgcgtgccttgccgatgaagtaacccaggcccacggtgatgaagagcaccatcaacgggttgcctgcaaacagatcaacggagcatttcataggggggcgtcgtttgggggacttgattgtcagggattgagcggaggcagagcgggcatggcttgccggtgccgtcgcaccggcgccctggcagtatggcggcgcaggccctgggccaacggggtgccattccaggcggcctgggccggcatcgcgccgtagagatggcgttgcaggtcggtcacggcatcggcaagggcggcatcgccgaccgactctgcccacactgcgggggtggtgccgtgggcggcgcgcgtccatgcgcccagcgcctggctggcggcagcggcattgcctgcctggcaggcttgcagcgttgcttccagctgcgcgtcggcaccttcggcgcgggcgcgcttgcgctcggccagccgctggcgcagccgggccagcgccggccgcatacgccaccacgacagcccggctgccagcacagccaccagccccactgccccccacagcaatgtccgccagggcaagccgccctcgcccggcagcgcgccggcagacggaccgcccggggccagcgcgctgtccgcgcgcgcggcagccactaccaccctgatcgcgggcgcttcggactttgccggcttgcgtgtggccggatcgacccaatccactgtcaccgccggcagcgtgtaggtaccggtccgctcgaacacgtaggtgatggcatccacgcgcgtgccgcccggcccgggcgcgtcctgggcgtgatcggacagccgcgcatcggcgctgaagacacgcaccccgcgcggcgccgcggcgtgcggcggatggatcatcatggcctgggtctgcggcgcaaaggtggtgacggtgcgcaccagggcatcgcccgcgcgcagccgcacggtgccttcgtcggaggcgtggtccagcgcctgtgtcacggtgagccgggccaccggcagcaagggccgtccggttccggcgccggccttcaccgcgccgccggctcccgcgcggatccgcgtgggcgggaaggtcacgctgccctcgcgcggcgcgccgtcgtcgcccgcataagtgaagcgcacggtcgcggttggcagctcgaagtcgccgtcctgctcggcggtaaaggcataggtcttgcggatgccggcgtagccaaccccatcgatggtttcggtcgagttcaacgcgcgctggtcaggcatggtgacgacggcgcccggcacctggagcaccgggaaggccggcgccgacatgaagaagttgggcgccaggatagtgacgtcgatgctgatctgctggccgaccagcaccggctgcttcgcgcccacttccacgcgcacgatgggctcggcggcacgcgcgagcaagggcagcagcaacgccgccatcagcaagatgaccagcggcgcaagccgccgcagccacccgcgctgacacacggcgcggccgctcatcgctgcccctgctgcggtgcggcctgcccgcgctgcagcgcgaacttgcgctgcaacaggtcggtcggcgtggtccggatcgcgcgcatccacatctcggcgtcctgcgtcaggccgatatgcatggactggccgccctgctccggcggcttcgcggcgtcgtacttgatttcatccggcggcacgtcggggggctcttcctggtcgtcggggtctggcttgtcttttggcttctgctgcgccagcagcttttccatcagcgccaggttggccgtggccgccggccattgcggctggcgcctgagcgcctgacggtagcgcgcggcggcttgctggtactggccctgccgcgccagcgcattgccctggttgtagtcggcctgcggtgaatcgaccagcgcgaagctctgcaccgcctgcgcgtactggccggcgcgatactgggcgatgccgcgccacatcgcatcgtcgaacagggtcgcggcgcgcgcgaagtcgccctgctcgaaggcgcggcggccttgctggtcatgcgtcagccacaggtcggcaaagcgccacgggcgcgcgccatcggcctgctgtgcgcgcaagcccggctgcggcgcagcgaacgccagcgccagcagcaggccggcggtccagcgcacggtccatcccttgcggaaccacagcatggccagcagcgtgaccggcagcaccagccaccagccttcatccttccagcgcgtgcggtcgccagcctgcatctgttcgaggtgcgactgcacatggcgctgcacccacgccacgtcgtcgtcgctgccgggcgtgaaggtggcgagcggtgtgccgctgtcgtcgccgaagcgcttgaacgccgcgacatccagccgcgcgaacacacgtgcgccgtcctgttcgacatagccgcccgctgcattgcgcagcggcccgccctgttccgtgccgatggccagcaccaccggctggctgcggccgctgtccgcctgcgcgcggaaggccctggcggcggcggggtccacgccgtcggtcaggaacaggatggtgccgggcaccggctcacgcgccaggtcggcgtcaatggtgcgcagcgcctgtgccatgtcgcgccccggcaccggcatgatgcgggtctgcagcgcatcgacaaaggtctgcagcaggttggtgtcgtccgtcagcggcagcaccaggtgagtggagccggcataggcatagatcgccgtgcggccgccgccgcggcgcgccagcagcgccttgatcttgagcttggcgcgctccagccgcgtgggcgtgacgtccaccgcgtccatggtgcgcgacaggtccacggcgatcgccagcggtgccttgtcatccaggaacggcgggcgctcctgccgccagctcggccctgccagcgcgatggcgccgagtgccagcagcagcgcggtcaggtgcaccgggcgcagcgccacgcggcggcgttcgccgatcaccagcgcgtcgagcaggtgcggcgcgatggtctggcgccagcgccgccgcacatcgccgcggcgctgcaccgcccacaccagcagcgcggccggcaccagcaccagcagccaccacgggcgcaggaaatggaagtgcgcaagcgtgtcgagggcctgcatcagcgcccctccccggcggcattcgcgatctcgtcagctcctttggccgtgccacgccggcgcgacaaccacgccgagtagccgagcatcagcaactggtacgccagcaccagcgccagcgccgcccccagcggccacatgaacagctcgcgccgcggccgccatgacaaggtcttctggttgtgcggcgtgatccggtccagcgtcgcgtagatggtctccagcccggcctggtcggcgccgaagaagtagcgccccccggtctgcgcggccagccgctgcagtacgccgagatcgaccttctcctcgcccgaagcattgggatcgccgatgccgatggtatgtaccaccaccttgcgctccttggcgatcccccccgcgcgctcgggcggcatccggctggcggtgtcgttgccgtcggtcagcacgatcagcactttctcgggcgcttcgctgtgctcgaacatcttgatgccgagcccgatggcatcgcccagcgccgtgctcggcccggccatgcccggcagcaggccggtgatcagcgtctgcaccaactggtgatccagcgtgaacggtgccagcgggtacggcgcgtcgccaaacacgatcaggccgatgcggtcgcccgggcgcctggcgacaaaaccgctcaccacctgccgcaccgcctgcacgcgcgggatcagcgcgccggacgggtcgccgaagtcgcgtgtgtccatcgactgcgacaggtccagcgcgatcagcaggtcgcgcgccggctgtaccttctggatcggtgcctccaggaactgcggccgcgccagcgccgtcaccaccagcgcccacgccagcggcgccagcacccattgcagccggttgcggcgcgacaccacggccccggtggccggggtcaggccggcggcgctggccacctcgccaaagaacggcaggcgcaccgacgggctttcctcgcggtacggcggcagccaccaccacagcagcaacggcagcggcagcagcacgaagagccaggggtattcaaactggtacatggtgctccgcgatccagcgccggcacgtgccggccaccgcctgcacctgcgtctcgggccattgcgccagcaccgcgtcgtcgcggtattcggcgtcctgcaccagcgcagccagcagcggcgcggcgtcttgtgcgcgcccggcgtgtgcctgcaggaattcggcccagccggcgccggccaggctggcaacctgggcgcgcggccacgcggccagcgccgtgcgcttgagcagcgccgccatctgccgcagcgcggcgacgcggtgcgcggggtcagcgcccagcggcagtcctgccagttcggccagcgcctcgcgccggtagcggttggcgcggtagcgccgccacgcgcgccagcctgcccaggccagcgccagcagcagcaaggcgccggcgatcggccagccgatggtctgcggcgcccaggatgggggcggcggcacggctacgtcggcaagggtggccagcgtagccacgcccgtgctgtcttcgacgcccgctgcggtgctgtgcgtgaggctcatcgcgccgctcctgcgcgttgccgcaccggcgtctgctgcagcgggcggcccagcagccggcgcagctgcagcgccgtttcctctgccgccgacagcggcagcagcggcacgccgatggcgtggtgccagtccagcagcgccttggcgtgcgtatcgacaaactccgcaatgctgcgccgcgtggccgcgtggccgaagcccagctccacctgcagttcgccgtcgctgaccaccagttggccggactccggcaactcgctcaggaagggatcgtggaccaggatggtcagcacgtcgttgcgcgccgccatttccagcatcaggtcgcgggtgcggtcgtcatggccgtcgaaatcgctgatgacgataaccaggcagtcatggcgcgccgtgcgcgcggcgcgctccagcgccgcgttcagcttccccgcggcgcgccgcgccggcgcatcggcgcgcaaggcctggttgaagcgcgcgatggcgcccagcagctgctgcacggcttcgcggctgcggcgcggggtgaactcctcggccttcgcgtcgccgaacaccacgccgccgacgcggtcgccttcggccagcacgcgccaggcggccagcgctgccgcctcggccgcgctgaccgacttcatcgcgcgccggctgccgaagaacatattgatgcgctggtccaccaccagcagcacgggacggtccttttcctcggtgtagacgcgcacgtgcggcttgccggtgcgcgcggtcacgcgccagtccatgctgcggatatcgtcgccgggcagatacaggcgcagttcctcgaaggtcagtccgcgtccgcgcaccttggaggcgtggcggccggccagcacgctgtgcaccggctggcgcggcaggaagtggaagtcgcgcgcggccacttccagcgcggccagcgccgccgcgtccacgctgacgccggcaacggtcgcggcagccggcgcctgcaccgcagatggcgcggcgcgggccatggcgcggaacggcagacgcatcggctagccctcgcgcgccgtcaagccaccgccacccgctgcaccaggcggtcgattgcggcatcggcaccgatgccggccgcatgcgcctcgtacgacaggatcagccggtggcggaacacgtcgtgcaccaccgcctgcacatcctcgggtgtgacgaaatcgcgcccatgcagccaggcgtgcgcgcgcgccaccttgtccagcccgatcgagccgcgcgggctcacgccgatctggatccacttgtcgaggtcgtcgtccacgggcttgggggcgcgcgtggcttgcaccagcgtcacgatgtagcgctccaccgcatcgctgacatggatgccatggatctccgcccgcgcggcgaagatcgcttcgggcgccagccgcactgcctgcgccccacccaccgccccgccgccggcctcttcctcgcgggccagcttgacgatgtcggcctcggcgtccgcctcgggatagcccacgctgacatgcatcaggaagcgatccatctgggcctcgggcagcggataggtgccctcctgctcgatcgggttctgcgtggccatcaccaggaacagcggctccagcttgtgggtggtgccgccgacggtgacctggcgctcctccatggcttccagcagagccgcctgcaccttggccggcgagcggttgacctcgtccgccagcaccaggttggcgaacaccgggccggcctggaatcggaactcgcccttgccgccttcggtgaagtacacctctgaacccgtgatgtcggcgggcagcaggtccggcgtgaactggatccgcgacagccgcgcatccaggttgcgcgccagcatcttgatggcccgcgtcttggccagcccaggcaacccttccaccagcaggtggccatcggccaacaggccaagcagcaagcgttcgatcatgcgctgctgccccacaatcgattcgcccatgcgctgctgcagggccaggacgtcgtcgcgtgcgctcatggcgtgttccttggttcagcaggtgcgcggcgggcggggcgagctgactggccgccgacgaaccaggcgtagtagggattgtcgggatcggcgcgcatggcctgcgtgatatggctggcccaggcttcgcggtcaccgcggtaggcatcgaggccggcgcggtagaaggtgtgcagcacttcgcgctcgcggcgcaagtcgcgccagaatgcgtcatcggcgcccgccagcgggggttcgctttgcagcgacagcagcctggacaaggtttccgggaaggcgtcgcggcggacccagccggcgtattcgatgcgcgggcggtcatcggtgacggccggcgcatcggccgcataccagtccaggccggcgcggtcggtgacccaggtcgccatcagcgccgccggcgagcgcacgcccacggcctgcagcgcggcagcaacttccggctgttcaaagcgcgtgcggatgcgcgcggcatccagcgccagcggcgacagcgaacccaccagcatcatctcgtgcagctcggtggtccacagcatggcgtgcgggaacacgtccaggaagctgcgcaccagcatgcgggtgtcttcgtcgttctgcgtcggcagcggcagccactgcgccaccagcccgccgggttgcagccgcgctgccgcgaggcggtagaaatcggtcgaatacaggttgaccacgccagccgccgacggaggcggcggctccagggtgatcaggtcgtactgctgcgtgctttgcagcagttcacgccggccgtcgcgcaggcggatgtccatgcgcttgtcggtggccacgccgaaattgccctcgaagttgggcacggcgcgcgccaccggcggcagcagttccgccaccacgcggtgttcaaggccaggccaggccagcgtggcgccggccgtgataccggtgccaaggccgatgaccagggtggatttgggcgtgccgttgtgcacgatcaacggcagcagcgcctgcagccgcatatagcgctgcgaggtcatggcatcgcccgaattggagacgccctggatatacaggcgtcggaagcggttgctggacgaggtctgctccaccacggccacggtcgcgccgcggccctcctcgtagaacaccaggtcgccgccgcgggcgcgcgccagcagcgtggcgagccggtccgcaggcgccagcgcggcggcgatcacggccagcacactgaccatcggcaccgcccagcgcgctacgcggcgcacaccactacccagcgccaccgccaccacgccgaccacgccagcgctcactgccagcagagacagcgtatgcaccagccccaggtatggcaccagcacaaagccggccagcgccgtgccggcgatgccgcccagagtattgagcgccaccacgctgccgacgccggcgccgacgtgccggctatcgacgctcacgcggagcacgaaggggaacgccgcgcccagcaacagcgtgggcacgaacacgaccgacagcgccgccagcgcaaagctggcacaggccgccaccagcgggctggacgtcagcccctgcacccaggcggacaggctgccctgcgcccgcagcagccattcgcccagcagcacgaattcaagcaacgccaccagccccgcccccgtcaccagcaggccgaaggcgccccaggggtcgcgcacccggtcggcatggcgcgcagccagcgcgctgccgatagccaggccggcaaggtacgttgccaacaccacggtaaaggcgaaggtacgcgtgctgaggaactgcacgatggcctgcgaccagaccacttcgtagccgagggcaatgccgccggcagcggcatacagcaccagcgccagccggccgttggcggcatcgccgccggcagcggcgccttgcccggcagcggcggcaaccggctcggccgcagcttgcgtgcgcgcagccagcagccaggccaccagcgccgcggcgccattgagcatgcctgccgtgaccgcactgcccaggatgcccagcagcggcaccagcacgaatccagccagcagcgtgccggcgatggcgccggccgtattggcggcatacagccgcccgccatgcacgcccacacggccggcacctggcgtcagcacgcgcatcagcaccggcaaggtgccgcccatggcggctgcaggcaggatcaccagcacaaagggcaaggcccacgccagccatccggtgcgctgctccagccaggcgaacggcgctgccgcatgcgccagcgccacggtggcgccgatgcccagcaccaggacgccgatttcgagccacgcatacaggcgcagcggattgccgtggcggtcggccacgcggccgaacagccagccgcccagggccagcccgccaaaaaaggcgctgaccgcggtggtgaccgcgtgcacgtcgacgccaaccaccagcgacagctggcggatccagacgatctggtaaaccagtccggccgtgccggatatgaacagcaacacggccgcccaaagccacgtctggtcggccgtgttgccccgcagcgccaaggcggatgcggaatattcggtcttcacggagcgcgcccggcgcccgtccttgccaccattgccgcccggggcggcatgagattcgatcatgaactggaccgttggcgcgaaggcccgcgcgtacgcgggccttcgccggtttcaactgccgtcacaggcggacggcgctgatgactgactgcattacttcttcttcatcgattcttcaatcttcttgtcgacctgctcgcgcacctggtcgatgctgaagctggccgggcgctggctcggcgggtagttgacgaaggtctggaggaacgccgcagccttcatcgtcccgatctcggtcaggtacgcgttcttgcccagccagtcgttgtactggtcagaaacgatgtctgcgcgttcatacggatccatgcgcaggttgaagatcttcggcacccgcaggcacttgaacggatcctgccagacctggaacccgcccggtgtagtctgctcgcagaagacgaccttccagtcgtcatagcgcatcgccacgagcacgccgtcgtcgttgaagtaatagaactccttgcgcgcgcccttgttggtctgccccgtcaggtacgccaactggttgtagccgtcgaggtgtaccttggcgttcttgctgccaagcgacgtaccctttagcagccgctccttgatatcgccgtcgccaacggcagccagcagcgtcgggaaccagtcaagcccggagaacatctcgttgctgacggtgcccgccttgatcttgcccggccagcggatcatcgccggtacgcggaacgcgccttcccagttggtgtttttctcgctgcggaacggcgtgcttgccgcatcaggccaggaccactggttggggccgttgtcggtggtgtagatgacgatggtgttgtccgcgatcttcaggtcatcgagcgtcttgagcagcttgccgacgtcgccgtcgtgctcgatcatgccgtcggcgtaatcgttgccgggcatgccgctctggccctgcatggacggacgcacatgggtgaacgcgtgcatgcgggttgtgttcatccagacaaagaacggcttgtcggcctggacctgcttggtaatgaacttctgcgccgcgtcggtggtctcgtcgtcgatggtctccatgcgcttggtagtcagtgcaccggtatcctcgatcttgccgtcggccgtggagtgcagcacgccacgcggcgagaagttcttcacgaatggatcgttcttgtccttcggccagtacgggcgctgcggttcttcttcggcattcaggtgatagaggttgccgtagaattcgtcgaaaccgtgcttggtcggcaggtactcgtcgcggtcgcccaggtggttcttgccgaactggccggtggcgtagccgagcggcttgagggcctcggcaatggtcacatcgcgggcttgcaagcccacggtcgcccccggcgcgcctaccttcgacaggccggtgcgcagcggcgactggcccgtgatgaacgacgagcggcccgccgtgcagctgttctcggcgtagtagtcggtgaagatcatcccctcacgggcgatgcggtcgatgttcggcgtgcgatggcccaccacgcccatgctgtaggcgctgatgttggtctggccgatgtcgtcgccgaagatcaccaggatgttgggcttcttgcccgacgtattgacagccactggcgcggaagcggcttcaggtgcaaccggcaggttggactgcgccggcggctgtgccggcgtcgcggacgtgtccggcgccgccgcagccggggccggggtcgccggctgctgcgcggcaggcgcctgctgtttgggctcgtctgccttcttgcagccggcgatcgccgcgatggcgatcgccattgcggccatggcaaagcgcgcgccgcgccttgccggggtggactctgtcattcgttgcattgctgctcccgatagtcaaacagcttcaacctgcgtccggcacgcctggcatgccggctccctcttctgcctacttcgcaccagccgtggggtaaacctgctgccagtcctgcttcatgctgaccaccgtccagcccttggcgcgggcagcgtccagtgccttgtcgagcttgcccacctttgactggcggtcataggcgaactcgcgctcggcatcgtcgtgatgcaccagcacgcccatgcgcggaccgtcgccgccggtggtgtactccagcatctgcaggtcgccgtcggagttgcccacggcgaggatcggccggcggccgatatggcggtagatgccgaccggcttgcccggcccgtcatccacgaattccagcttggggtcgcgcaccagcaccggcttgccgtcgcgcaccaggtagcgcacggcctgcgaggagccgatcacctgctcgggcggaatgccatagacagcctggctccaggggcgcatgaactcgatggtgccgccggagacgatgtaggtcttgaagccgttggcgcgcaggtaggacagcagttccagctgcggttgatagaccagctcggtatagggccggttgaacctgggatgccgcgatttcgccagccagtcgcggatggtgcggtcatactcgtccgtggtcatgccgctgttggccgtgacgaccaggccggccagctgcttctcgttgcgcatcaggccctccatgtcgttggccatcagcgccttgaaggcggggttgttgcgccactccgggtgttgcggcgcggcggcgcggatctggtcgagcaggaagaagaactggaagtacagcggctgctcgctccacagcgtgccgtcgttgtcgaacactgcgacgcgctcctcgggcggcacgaatgtcggcgagcccttgcgcgtcacgtcggcaacaaacttcagcagtgcctgccgtgccgcaccgtcgcgccacgacgccaaagcctgcgcggccggctgcgccgcctgggtgacggcggcctgagactcgggcgccgtggcgggcgtcgaacagcccgcaagcgcaaggccggccagcaccagcgcggcaatggccctgcgcgaggggctggctaggaatccgcgggtggcagcgatgtccatatggttcactcctgtcgcgtgctgtcgtgctcgtcgttgtgctttggttcgcgcgggcgcagcgctatcgagccgcctgcccggactggccggccaaggccaccggcgcctgccgttgccgttccgcccagcggccctcgtccatcaccagccggaaaccgaggtgcgacatgctgttgtacgggtcggtcccgcgccgcgcgctggggcggtaactgaggcagaaatcctcgttgcagaggaaggagccgccgcgcgtgacgcgcttgggcgcattcaccgggacgccgggctcggccggatcccacgaggccatcgggccgaccgggttttcgatcggctgggccttgccggcctcgcgccggaactggtcggcccgataccagtcggacacccactgccaggcattgccggtcatgtcggccaggccatagccgttgggcgggaaagtgccaaccgggctggtgccgagcgccccgcccgccttggggctgaccaccgggaacggctggttctgctggccctgccagacattggccatctgcttgccgtcgggggcgaactgctcgccccaggcataggtggcctgctccagcccgccgcgcgcggcaaactcccattccgcctcggtgggcaggcgcttgccggcccacttggcgtaggcctgcgcgtcttcatacgagacctggaccaccgggtggttgtccttgccttcgatcgagctgccaggaccggtcggatggcgccagtcggcaccgggcacataacgccaccagcgcgagtagtcctgcagcggcaccggccgcggcgtgcccacgaagaccatgccgccggccaccatggcgctgtcgggcgggcgcggcgtgccgggcggcagctggacccgcagggtttcccagtcaggtgcccgttccgcggtcgagacgtagcccgtggcttcgacgaacttgcggaattccgcgttggtgacgtggtgctggtccatccagaaggcgtgcacgcgcaccttgtgggccggcttttcgttgggctgcgccatcttgctgtcgctgcccatcaggaactcaccgccgggcacgcgcaccatgccagcgggtccgcgcttgccatcgccgatgacgatggcgggcgccgttggcgtccgccccttcatgtaccagtagctggcgccgaggcctgctgcgaccccgagacccagcagcaccaggatcagtgccctctgcccgctgcgccgtcccgcggcaagcgcaaccgagccggaacgccccgcgcccgcgccgggattgctgcctttacgtcgtccgctcattcactccgcctctttgtatacaaaaatcatgctgattcagcgcaaaccatgatctcagatggctacggttatcagaagtcagctttttctcgttcgggggccaagtgaattaagtttttcttgcgcgcactgccactggcgccctgctcatcgctcgctatctgcccttggcaccatcttcgtcagggccgccggatcttcctcaccctcattgaggatgccgtagtccgccggaaacagcgctgccagcggtggcggatactgaaaggcgtgcagcggctccaggttttcgccagcgtcgatcacgaacacctcgatcaagcggctgcggccgccgttctcctggcctgccacatagtagtgaacgcggttttgccagacgaagtgcccgccgaagtaaggcttggagacatccggcagcccggccagatgcgtttcgcacagcagcaccgcttcgcgcaggtagttccggctggacgtctcatcggaggcggacagcctggccatcatgccccgcctgtccttgatcttcttgattgccatagcgtagcgagcaggttgggcgcgtgggcgcccggacagcctaccggcacatcgggcggacctcgcaactcagtgccatgcgctccccacctggatatagaaggcgttctggcccttgctgtgggccacatcgagaccgatcgacacccccagcttgcgcgcaatcatgtagcgaaagcccgcgcctacgctgtagatggtcgatgcatcggaaaaatcatgccagcgcccatatgccttgcccaagccggtgaagcccagcagcgaccagcgcggcgtcacgtcccagcgcagctccatttctgccgccagcgcattgcggtcctggcagcgccccttctgtaccccgcgcaggtccacgaacggctgcgcgtagaacggcacgtcgccggtggaaaagcgcgtatcggcgcgcagccccaggatcacggtgcgcgccagcggcagccaggtgaagccgcgcgcgttatacatattgaatgactgcgtgctgccgaagccgccgcgcgcgaactgcgcctccagctcggcatagctgccgcggctgggatagaagatgttgtcgcgcgagtcgtagtcgaccaccaacccggccttgccgatgcgctgggtcttgtcgaagctgccgacttcacccgcatcgccaaccttgaaggtcgcggtcgaatcgaaatacacgtagcgcggccccacgtaccaacgcgtatcggcaacccgcacgagcagttgctgcaccaatgccacgcctctgagttcgtaggcacggggctggttcagcaagccgaagtagtccaggtttgcattgaccttggcgatgcccccaagataacggtagcggtcgccgtcccacgtgtggaagtgcgccacgcctgcgccccaggtgccgttttccgtatacgcaccgccgatggctgtaatgttcggcggtgcgggcccctttccactggccttggcgctggccgccgcatccgccatggattccgagaagaacatcagccccagcccgccgccgtagccaacggctggttccgtgataacgaccggcaccggcagcgcgcccttgtgattgagcaggaagtcgctcatgtccagcttgccgtcctcaggatcgaagaacgacagcggtttcttttcagccggcgcttcagcctggccgaaggcggcgtcgcaccagagcaaggccagtgcgcttagcagcgatgcaatgcgctggcttgcctgggagcgggtcatcagcaagttatgaaaggtccctgcttatggctacagcgggaactggatattcaagcccatgaacacccggaatttgggcaccccgactccctcgtgccccaccgtccattgcggctcggcaaacaggttgtagatttccttgccgattttccagatcttgcccgcgccgataccgagggggatgtagtaattcccacgcttgaggtcgaaattccaggttgcggtgctgcgcaggtacctgccttgcggcaggttatagatcacgaacggctgcgcggtcaggttgtcctgggtgggccggtcgctttccccggcaaatgaatgctgccaggtcacgagcccgccgatcatgccccatttctgcggggaaatacccacgccggccaggccggcctgccatttcccggtgccggtctggtcgcgcgatgccgtgggaatggtgagttgggggccaatgccccattccatgcccaggcccttgagcaacaccaggttgaacaggttcaggtcgcccagtccggtcttgctgccatccggcgcgacattcggcgtggtgacgacgggcatcgtgaaccgacgatctgcggcaacccgaacagcttgtgcggaatggtgccgcgcagcaggacgctgtttccgtcctcgtcgccgagtccgtaatagcgtcccacgtactggtcctgcagattcagggtaatggtcgggctcagcggattatttgacgcattcatgtcatccgtcgagggccctgccgcacaggcaagcgccggcaatgttgctgccacgctgcccgcagcaagccttaatccctgcatgactgaattcatttggaatcgttgccctgaatgaaattggtaacgcccgccgattgaatatcggcgcttccatcatcgcagaccgcctcaaggcctgtgaagtaaatatttgcgatgccgtgatgaagattttcgtcggcttgcgcgctggcagtgacaggggtctttgctggtagcatgcaatgtcacaaaaatatgagggtggggcattgccttactgtgtaatttcactatagctggcgcgggcaggcatgcgccagaggccggcattccggcaagcgcctggccggccttgcattccttgttccttgaatatgtcaacgaccatcgcaaaccggctggccattgctgcttccttcctctttgcctgtgcaggtgcgaacgcgactgaaggcgccctggggcgacccgtgaccggcaccagcgtgctccccaatgtagggatcgtgtcgccggaacccgcgctcatcgtgaatgtcggcgagatctacctggatggctcgatcggcggcagccgaaacgtgcccatcgcaggcaagacggcgctgggcgtggacggcaaggtcgcgttcaccctggcaacggtgatgaaggtatgggacaccgataccggcccctggaactttgcctccagcttcacgctgccctatgtctggaccaaggtcacggccaacatcagcgccggcggccggggcgccagcacccaggacactgcatcgaacctgttcgacatcaccttcgcgccgatcatcgcgggctaccatttctcaaagaccgagcatgtggctctgagcctgaatgtgtgggcgccgaccggcaagtacgatcccaacgcactggccaaccccagcctgaacaactggacgtttattccgcaagtggcctacaccaagctgttccccgaacacgggctcgagttcgatgccgtcgccggggtccagttctacacccgcaacaacgccaccgactaccagaacgcaccgctgttcacgctcgacaccatgctgctcaagcgctttgccaacggcgcgggcctcgggttgatcgcgggcacgacgcagcagctcggcgacgacagcggcccgctggccgaccgcctgaacggcttccgcggccatgactgggcggtgggcccgatcgtcacctacgacaccaagatcggcgcgaagagcctgctgtcgctgggcttgcgctgggtgccgaccgttgccggcaagaaccgcctgaagagcacgaacacgttcatggggacagcgactgtcgtgttctgatggccgcgcgcgcggtgagcccgctcaccacgtgtacttcacccctgccctcagcgcgtactggtaaaaggattgctggccccaggaacccgacacattggtccagccggtccagcgcttgccgagatcggcgttcagccccagcttcagttcgaagcggttatgcggatacagcccgccgatcggcaactggttgaacgagatattggtgtcggtatcggaataccaccagttcaccgtcgcatacggctgcagtttgcggccgtcctcgcgcacgaaggtccgatgcgtgcgtacgcccagccgcgcgatgatcccgctggaatccgccccgctgacgcgcgtgccgttgggctcggcaatgtcgtcctcgctgtagttgacatagatgagctgcgcctgcggctcgatcacccagtcgcgcggcagtgggatggcatagccgacttcccccgacagccctagtccctgcgcgtggtatcgcaccgtcggcaactggtcgccttcaacgcggttggtgaaccagccatactggaaccaggcatcgacataggcgcccagcttgttctcgtcgttctggtaccaggcgccgtagacacccgcagcccacccttccactttgcccctggcccgcgtggggttgccggcggcatccgcgtcggtgctggcgttgccatagctgcccgttacgccgacatgcaggcggtcggtctcgctggcaacacgccacctggccagctcggcaccgccgtgcagcaggaagctgtcggtgcgggtgcggaagttgccgtccttgctgcggctgccctcccacttgcccactgcgcgcagccagccgctgcgcggcttgtcctgcactggcgttgccgcccccggtggcattgatatcgaacccgtcgcgctcgttgccgccaaccaggttgttgaggttcagcgtcgtgcccgcattgacggtgatagccgacccgccggccgtgctgttggtgacggcaacgccgtccatgccggccccttgcatcgtgatggcgctggtgccgccattgaacgtcacgctggcatcgcccgggttggtgatgacttgtgacgccacgccactggcagccgtggcggtggtattcgtgatggtggtcccggtcagggtcaccgaggcattcgcccccctcgcgagcgcgcgcaggctcgcgcctgtgttcgtattgaaggtggtgcctgacacggtctccatctcggcgttgcccgatgcaggcgtacaggacagtgccgtataagtgccgctggcaatcgtgccgcaggcggtctgtgcgcggacttcgagcgttgccagggccatggttccggccggcgcaagccagtaagcgatcagcgcggcaatcggccgcagggcgtggttgcgtcgccgcttgatgatggcaccgtgctgcatgcctggtcccgcaactcgcacagtgatctcctttgtaggatttttgttgcattctcgggaaccggcaatctgcgcaccagtgaaacatttggtaggctgtattaagcctgctgcgtcagccgaacggggtagcagcgtcaacttgagggatccacgcgccaacgtccgcgttgatcaggctcaagccccgatccattacaagcctgcacactggcgcccatgaccacactgccctcttctccgcccgtcgccgctgacgcgggccaacccaagcccccgcccccctccgtggctgcacgccgcccggctcttgtgccgcggggccgtttcgcgtggctgactggtatcctgagctggacgcttctgattgccagcacgctgttctggtgcgcgctgctgtttccgctcgcgctgctcaagctggtgctgccgtttgcccccgccaggcggcgcatcgatccgatgctcaacggcatcgccaccgcctggatctccggcaacaccggctggttcgcgtggatccagcgtgagccgtgggacgtccagggcaatgagggactgcgctatgccgactggtacctggtcaactgcaaccaccagtcgtgggccgatatcttcgtgctgcagcgctcgctgaaccggcgcatcccgctgctgaagtttttcctgaagcagcagctgatctatgtgccggttatcgggctggcgtggtgggcgctggactttccgttcatgaagcgacacggcaaggcgcagctgcggcgcaatccggcgttgcggcgccaggaccaggaaacggccaagcgcgcctgcgcgaagttttcgctggtgccgaccagcgtgatggtgtttgccgaaggtacccgcttcaccgaggccaagcgcgcggcccaggactcaccgtaccgccatctgctcaagcccaaggccggcgggctggcggtggcgctgaatgcgatgggcaacaagttccgctccctgctcgacgtcaccatcgtgtacccggaaggcgcgccaggcttctgggacctggcctgcggacgcgccggcccggtgctggtgcgcatgcggcagttgccggtgccgccggccttctgcgaggccgactacggcagcgacaaggccttccgcacggaattccacaactggctggcacgccagtgggaagccaaggacgccgagatcgatgcgctgacgccgccgcgcgaaggctgaagccctgctacccgggcagccgctcgactgcccgcttcccctgtcccaccgccgcggtcagcgaagggctgccggcattgtcgctgttggcgatgctgatattgccgacgccggccagcccgggccacaccgcgtcgggcgccacgttctcagcggccaggctgtcgggcatatagctgtagccatgcgcccagcggttgacggtgatgccgcggatcacgtccttcgaagcaaagcccttgtgcccgagcatgcggtcaagctgcgcgcggatgtcgcgctccagcgtgtcgaacggcgtgcccagcagcaaggcgcggcccgcgcggaagcggtcgcgcgcctgcatgccgctgtcaggcacggtcggcacatagagcatgtgcagcacggccggatcggagggctgcctgcccgccggcggttccagccacaggtcggtataggccatggccggcgcgtggatgcggcgcgtgcgcagcgcggcgaacgcctgccagtggtcgagcgccaccttggtgtagaccagcggcgccttggcctcgttgtgcagcacctctttctgcttggccggcagcgacggcagcaggtacgggatcatcatgttgtagccggccagcaccacgtggcgcgcctcgacgcgatgcaggttgccgctgaacccgtaggtcacgcgcgtgatattgccgtcgggctcgaccgcgatcgcggtgctgttcaggcgcaggcgcaccggctgcccgtcgcggtccagccggctgtagtcgaacgcggccgacaccacatcggccggccgggcgatcgacgccacgcccgggatcaggctctgcaccagcagccgtgccagcgaggcattgccatccggaaaccacaggcgcgatgccggcgacttgccaagccgcacattgcccgccggcgcgggcatgttggcgcctgcaggcaggccgatggcgatggcgtcggcaaccgaaatcccatcgacatcgagcgcataggcatcgttgctgcggctgcgcaggaagcgctgcccggccaggccgatgccggccttgtcacgcaggaagctggcgtaacgcatggagcgcagcgcagccgcgcgctcggtgccggacagcgccggcaggtaatcggtggtgccggcggccagccgcgccagcgcggcgcggtccgccacaggcaaaggcgtgttgtccaggaagcgcgacagggcagccgcgtccggggcaccggcctgctgcccgctgcgaacatcgatcagctcgccgaacggatcgccagccacccactggtcgcgcccgaaatgctcggcatcgaagaacacggcgcggcccatgccgagcgcgccatagggatccgcaggcacagtgccaggcgggcgcgtggcatcgagcccgatccccgccagcagttcgcgcaccgcggcgtcgctggcagcgcctgccggcatttctgcactgccgccataggtcaccagccgcttgccgcgcaccgtgaactcgttgcgcttggcatgaccgccgaagtcgtcgtggttgtccaggatcaggatgcgccggttggcgccgaaacggcgccggtagaaccacgccgccgccaggccgctcaggccgccgccgaccaccaccaggtcgaaagcctcgcgcgccagcacgaccgggtatttcgcgccctcgcgcgccaggctgtgcgccagcgtgtaggtgccggcatggttgccgcgcagaccggtcagcgcgggcggatacgccacgcctgccccgccctgctgcgcgtgcagcaactgcaccggcgcaaggccggcggcaatggtcagggcggttccgttgaggaagtctctgcgcgtaatcgtcatcgggtgctcatcgggatgcgtcgcctgccgcggccgggtgctgcgcggccagctctttgcgccgtgccgccacggcggcttccggcaccggcgccgcgcggttgccccagctgccgcggataaaggtcagcacattggccagttcctggtcgtccagcgtccagccatagccgggcatgtggtaatccgccggtgcggtgcccacgcgcgcggtcacggcgccgtcgagcagcaggttcaccagcgaggccgggtcgggatcggccacggtggggttgccggccagcggcgggaacacgcgggcaaagcccttgccgtcggcgccgtggcaaggcatgcagaacaccgcgtactggcgcgcaccgggcacatcgaagcggccctgccgcagttgctgcgcggtggcggcatcatgccggaacggcttgtcctcgccgcgcgcgccgggcagggatttcaggtaggcggccacggcatcgaggtcgggcgcgctcatgtactgggtggcggtggagatcaccgtggacatcggcccgaacgaggtcgcgtgcccgttgcgcccggtgcgcaggaactcggcgatatccgcgcgcgaccacgcgcccaggccggtgacctggtcaccggtcaggttggtggcggaccagccctccacgctcgccccggacaggaaatggcggctgcgctcgtccagccccttctcggcgaacaggttgccgcgcggcgtatggcaggcgccacagtgcgccaccgcctgcaccaggtaggcaccgcggttccaggctgcgccgcgcgcggggtcggtgcggaccgggtcgtcatcgacgaacaggacgttccacgcggccagcaggctgcgcatgctgaacggccaacgcatctgcggcgcggggttgcgctgcgtgaccggcgccacctcggcacgcaggtaggcgtacagcgccgccacgtcctcggcacgcatgcgcgcgtacgagggatacggcatcgccggatagagccgcttgccatcgcgcgccacgccgtgccgcaaggcgcggtcgaactcggccagcgtataggcgccgatgccgctgccggcatcgggcgtgatattggtcgaatgaaccgtgccgaccgccgtgcggatcggcagcccgccggcaaacggcttgccgccttcgctggtatggcacgcggcgcagttggcgatgcgcgccaggtagcggccgcgttcgatctgttgcgtgtcggtggcggccagcgccatgcccacgggcagcagcaccgccagcgtcaggcaggccagcttgcgcagcgcacgggctgtggcgataccaggtccttggggcaggaaatgcatgggagcagtttcaggtcaggcagccgataccgcccagtttgccgcaagcaccaggcacaccaccagcccggcggccacggccacgccagtcaggatcagcggtaccgggcgcaaggtgtccaggtcgcgctggtgctcctgcccctggcgcaggccaaagaagccccacagcacggtccgcaacagcctcaacgggttcatggcatctccttgcacaacgcctttgtgtaccagtgccgattatgggccgtccgtgccatccataacagcatcagatagcaggaaattttacgtatcagtttgcctgtccgggagataatgcgctcacccgccccgcccccgcccgcccgccatgaaacgctacgaagcccttgccgagaccctggctgccgatatccgcaacggcagcctgccgccgggcacgcgcctgccgtcgatccgcaagaccgtggcccagtatggcgtcagcccctcgaccgccttccaggcctattaccggctggaagagcgcgggctggtgcgggcgcgcgagcgctccggctactacgtggcgggaccggcgcggcgcgagctgccccagccgcaggcgcggccgtcgcgccaggtgtcgacgcaggtcgacatctccaagctggtcttcgccgtgctggaaggcgcgcgagaccgcgagctggtgcagttcggctcggcctttccctcgcccgagctgttcccgtgggagcggctgggcaagtcgctggcgcgcgccggccgcgcgctcgacccgtggtactcggtcaacgacctgccgccgggcaataccgcgctgcgccgccagatcgcgctgcgctacctgggcgcgggcgcgccgcagccggccgaggacctgatcgtcaccaacggcgcgctcgaggcgctcaacctgtgcctgatggcggtgacgcagccgggcgacgtggtggcaatcgaatcgcccggcttctatgcctcgctgcaggcactggagcggctgcggctcaaggccgttgagatcccggtcgaccccgccgaaggcatcgacctgggcgcgctcgacaccgcactgtcacggcacccggtcaaggcgtgctggttcatgacgcagttccagaatccgctcggcgccagcatgtcggaagacaagaagaaggcactggtggccttgctggcgcgccaccaggtgccgctgatcgaggacgatgtctatggcgagctctacttcggcaaccgctgcccgctgcccgccaaggccttcgatacgcagggcctggtgatgcactgcagttcgttctcgaagacgctggcgccgggcttccgcatcggctgggtggcgccgggccgctttggcgaagccatccagcggctcaagctgatgaccacgctgtctgccggtgtgcccacgcaggtggcgctggccgaatacctgcagcacggcggctacgacaagcacctgcgcaagctgcgccatgtgctggagatgcagcaggggcgcatgatcgatgccatcggccagcacttcccggaagatgtgcgcgtgtcccggccggagggcgggtatttcctgtgggtcgagtttgcgcccggcttcgatgcattggcattgcaccatgccgcactggaggcaggcatcgggctggcgccgggtccgatcttctcggcgcggcagggttaccgcaactgcatccggctcaactacgggcacctgtggagcgatgaggccgaggctgcggtagccaccctcggccggctcatcgtgcagcagcaaggcagctagcgcgcatcgcgatggcggcgcagcgcccactccagggtctcgaacgctgcctgtaccaccagtgccagcacggccgccgggattgcgccggccagcagcagcgctgtgtcgttgagcgccagcccggtggcaatgcgctcgccgaaaccaccggcgccgacaaaggccgcgattgtggccgtgccgacgctgatgatggccgcggtcttgaccccggccagcagcaccggcaaggccagcggcagctctacatagcgcagcacctgtccgccgcgcagcccgagcgcccgccccgcatcgcgcatgccctgcggcacctgctccagcccggtcgcggtattgcgcacgatcggcagcaaggcatagagaaacagcgccaccatggccggccagacgccgatgcggcccagcagcgggatcagcatcgccagcaatgccagcgacggcaccgtctgcagcacgttgaccacgcccagcacagcctgtccggtgcgccgccgccgcgccgccagcatccccagcggcacgccgaccagcgttgccgcgccgaccgcccccgccaccaggccgacatggcgcagcgccaggcgcgtggtgtcgggcccgaacagcgcggcagccagccggctgcgcggttcggcaccgtcatgcgttgccctttgccccgcagtgccggccaggaacgcgcgcgcgattgcatcgaatgactggccatcgatctccgccgccgcattcatggcgatcatgtcgtcggcgctgacgcgcccggccagccgctccaatgcctgccaggcctgcgggaagcgctgcggtacgtcaaggcggtagaccactactgcgtcgtagcgcgggaagtagtgccggtcgtcttccagcacgcgcagcttgtacttgcggatcttggcgtcggtggaatagatgtcgatggcatcgacctgccccgcggccaaggcctcgtaggcgacgccatggtccagcccgaccgggcgttgcggcagtccatagcggctggccagccccggccagccgtcggcgcgccccaggaactcgtgggacaggccgagcctgaactgcggctgcgcggcgaggtcgctcagccggcgcagcgcaccggcgcgggcatcggacacggccagcgcgtaggtgttctcgaaaccaagcggaattgccgcgcccagccccatcggcgccagtgcccgctggatggcatcgaggccggcccccgggggcagtttgaggatttcggcggcgagcgtgccggtgtagtcgggatagaggtcgatgccgccggccttcagcgcctcgaagacgatcgcggtattgcccagccctggctggtgctgcgcggcgccgggcggccccgcggcctgggtcagcagttcgccaaggatgtacgactcggtgaagcgcttggagccgatacgcagcggatctgccgcgcgcgccggcatcgcgcccgcgagtgcggcagccagcacccaggccactgcccgccacaacgcgcgccctgttctcccgatctcccgactgccgcggatccaagccaaaacgtctgtcccgatatggggccggtgtgcgcccggcatcgctacatcatagctgccgcatgtccttatcccgaaatagtatttgctatttgcatgatgaaggcatcagaatccggattacacatacattaatcccgagacccagcccgccatggaaatccggcaactggaagccttcgccgcagtcgtcaccaccggcagcgtcaccgccgccgggcgcctgctcggccgctcgcagccggccatcacgcggctgatccaggagctggaggccgagctgggctttgccctgttcacccgcagcggcccgcgcgtcagcccgaccgagcaaggcttcctgctctatgacgaagtcgagcagacgctggccggcatgcagcagatccgcacccgcgccgcggcgctggcgcgcggcgatggccggcccctgcgcattgccgcgaccccggcgctggcggccggcctgctgccgccggcgctggcgctggcctttgagcgcgggctgtgcgcgccggaacgcgtcgcggtgcagagtgtgtcgcccgaacaggtggtgcacgcggtgctgaccggcgccgccgacatcggtctgaacagcctgccgctggaacaccgcggcgtgaccgtgcactggatcggccagtccgcgtgcgtcgcagccgtgcgtgccgacgacgcactggccgcacagcctgcgatcgcgctgcaggactgccgcgggcgccgcatcgtgaccatgcagaacccgtaccggctgcgccgccgcgtcgaccgggccctggctggcgccggcgtgcccgaagcgggcgtgatcgacaccaacacctcgatcagcgcgctgaccctggtgcgcgccgggctgggcatcgccgtgctggagccggtgaccgcccgcggcctgccgctggccgatatcgccgtgcggcccatcgatgccgatatccctttctacttcggcgtgatcacgccacaggcccgcccggccagcacggcggtgctggggctggtgcaggccgtggccgacgccgccgccgcgctgttgcccgacctggtgcggcgcgatcccgccgaacacggcgcgctgctgcaatcgctctatggcgatgccagcgacgacgctgacacgctcacgcaagatgccggacttccaagccatgactgacctatccgcccccgcccttacccccgccgccggcctggccgcgcttgaagcgcgcctgcgccaggacctgtcctggctggacctgcccgccaaggcctggaccatgccgcgcagccacgatggccaggacgtgctcgacgtcgccgtcatcggcggcggcatggcgggactcgcagcctgcgccacgctgacgcacctgggcatccgcgtgcgcgcctttgaccgcgccccggcgggcttcgaaggcccgtgggccaccaccgcgcgcatggagacgctgcgctcgcccaagcagctgaccggccccgcgctgggcctgccggccctgaccttccgcgcctggttcgaggcgcagttcggcgaggccgcctggcaaacgctggacaagatcccgcgcctgcaatggatggactacctgcgctggtaccgccaggtgctggcgctggatatccgcaaccagcaccaggtcgatgccatcgtgccgcgcgcggacggcctggtggcgctgtcgatgcagaccccggacggcccgcacaccgtgctggcgcgccgcgtggtgctggccaccggccgtgacggcctgggcggtgcctacgtgccgccggtcgcggacacgctgccgcgccacctgtgggcgcactcgtcggacgagatggactacgccaagctgcgcggcaagcgcgtgggcgtggtcggcgcaggcgcctcgggcatggacagcgccgcgaccgcgctggaggcgggcgccgccagcgtcgaaatgctgatccgccgcccggacattccgcgcgtcaacaagagcaagggcgccggcaaccctggcctgaccttcggccactacgggctgcccgatgcctggaaatggcggctgcgccattacatcaacacccagcaggtgccgccgccgcgcggcagcacgctgcgcgtgtcgcgccatgccaatgcctacttcaacctgggcgcagcgctggaagcgatcgaggcgcaaggcgatgtcctgcacgtgcagacaccgcagggcacgttcgagctggacttcctgatcttctcgacgggcttccgcatcgcgctggaaacacggccggagttcgccgccttcgccccgcatatccgcttctggcgcgaccgccatgcgccgcccgcgggccaggaagagcgcgagctgtccgactctcccgatctcggcgcagccttcgaattccaggagaaaacgcccggcgcctgccccggcgtcacgcgcatccactgcttctgctatccggcggcgctgtcgcacggcaccgtgtccggcgacatcccggcgatcagcgacggcgcacgccggctcggccagggcattgccgcgctgctgtaccgggaagacgttgagctgcactacgccgcgctgcaggcctatgccgaacccgaagtcttcggcgacgaatgggtgccggccccgccgccggcgctgcgcgcagccaaggcctgaatcccaccccgacctgaacctggagagtccgatgacccagcccccgacttccacggtcgacctgatcgaccagctcaccggcctcgcgccgggtagcgcgacatacgcgctgcgccaccagcgcaacaaggtcgtggccgccacgcaaggcagctacgacgccctgttcgaccccgccctgcctggcctgtcgctggcagagcgcctgctggttgcgctgtacgcggcacgcctgacgccgtcgacggcgctggcggcacactatcgcgcgcgccttgagcaggccggcgcagatgtcagccaggtccgcgccgcggccgaaggccagccggaggatattgccgacacgcgcctgcacgccatgctggagttcacccgcaagctgatcgaaaagcccgttgagggcgacaaggccgcgctgcaggccctgcccgccgccggcctgagcaccccggcagtggtcacgctggcgcaactgatcgccttcctgtcgtaccaggtccggctggtggccggcttggatgcgctgaaagcactgaacgacaacgccgcaggagcccaggcatgagcgagatcatcaaatcccacggcttcaccaatgaagtcctcgactggaaggcctggctggacgtggtcgaactcgaccaggccacgcccgagcaggtcgccgtactcgaagagagccaccccaaggccaaggtccaggattactaccgcttcctggtgcaccagcccgaaatcctgcgccagcgctccaccgccttcaacgccatcatgtacgcccccggcggcatgccgcgtgccgaacgcgagctctccaccacggtggtatcgcgcatcaatggctgcgtctactgcgcatcggtgcatgcgcagcgcttcgaacaactggccaagcgcaacgacgtgatccgccaggtgttcgacgatccccataccgccggcacgactgcgcgcgaacaggcaatcgcgaagttctcgatcgaactgaccgagcggcccgccgaagtcactgccgagcagctcaagccgttgcgggaagcgggcgtcacggatgcggaaatcctggacctgatccactcgatcgccatctttgcctgggcgaaccggctgatgctgaacctgggcgagccggtgtttccggagcaatccggggagtaagccgtcaggcgccagccgcaatgcgcgcgggcgctcagcccgcgctgtgatgcaccgccagccagacactgggctggctggcatcggtccacgccacccggtggcggcagtgggccggaagatgcagccaatcccccggcttcatgggatacaagccggactggccttcgatctcgatggcggcgctgccgctgaccagcagcacccattccgcctctgcgctgtcgtaccagaagccctcaggactggcctgcccgttggagacgatgcgctcgatccgcagcccgggccgttccagcagcggctggaaaagttcctgcgccgcgccggccgggacgtccgccagcaggtttccgtgttcaggctgcatgctgcctcctggaagggaagtcgtggttgccgaccccggtcagttacccggccccggcgccagtacgtcgcgcgcgccgttgcggcccatcggcgacaccaatccggccacctccatctgctcgatcaggcgtgccgcgcggttgtagccgatgcgcagctggcgctgcacggcggagatcgaggcgcggcggctggtcagcacaaagctggcggcttcgtcgtagagcgggtcggcctcgccgtcgccgccgctgtcgccgaacaggtcggtgctgccggcctcggccgggtcgccggcaaggatggtttcatcgtagtccggctcgccgaactgcttccagtgttccaccacgcggtgcacttcgtcgtcggcaacaaaagcgccatgcacgcgctgcggatagccggtgccaggcggcaggaacagcatgtcgccctggccgagcaggctctcggcgcccatctggtcaaggatggtgcgcgaatcgatcttggacgagacctggaacgccacgcgcgtcgggatattggccttgatcaggccggtgatcacgtccaccgaggggcgctgcgtggccaggatcaggtggatgccggcggcgcgcgccttctgcgccaggcgcgcgatcagttcctcgatcttcttgccggcgaccatcatcaggtcggccagttcgtcgatcaccaccacgatcatcggcaggcgcgacagcggctcgggcgcgtccggcgtcagcgagaacgggttcggcactttgcgctcggcggcctccgcggcgcggatcttctggttgtagccggccaggttgcgcacgcccagagccgacatcagcttgtagcgcttttccatctcgccgacgcaccagttgagcgcgtgcgcggcctgcttcatgtcggtgaccaccggcgccagcaggtgggggatgccctcatagaccgacagttccagcatcttggggtcgatcatgatcaggcgcacatcttcgggcgtggccttgtacagcatcgacaggatcatggcattgaccgccaccgacttgcccgagccggtggtgccggccaccagcaggtgcggcgcgcgtgccaggtcggtcaccaccggattgccggtgatgtccttgcccatggccagcaccagccgcgaatggtgcgcctggaacgaggccgcgttgacgatctccgacagccggatcatctgccggcgcgcattgggcagctccagccccatgcaggtcttgccgggaatggtctcgaccacgcggatcgaggtcacgcccagcgcgcgcgccaggtccttcatcagtccgaccacctgggcgccgcgcacgcccatggcgggctcgacctcgaagcgggtgatcaccgggccggcgccggcgccgaccacggcgactggcaccttgaactcggccagccgctgggcgatcagctcgccggtttcgcgcaggcgttcttccgacacctgttcggcgctgtcgacaccggtctccagcaggtcggccggtggcaggcggtagtcaacgatggggcgcggcggcggcggcgcgaccggcaccggcacgggcgcaggctgggcggtagccagcggcacggtgcggccgaccacggcgggcagcacgatgcgcggcttggcggccgggaccggagcctggttcagtgcaggcgcctcagcgggctcagggacttccggggcctcggtcgcttcaggcagtgctgctgcctcggcaggctcggccgcatcgggttccgcctcctcggcgatcaggccgttgccgtccatcaatccgtccggttcgctgtcctccgcgggtgccggggtgctggcatcgagagcgctgccctcttccatcgcggagcttgccacggcctgggctactgcctcggcgccggtgatatccagtgcgggcacggctgctgccagcgcttcgggttccccaatgacaacggcgtgatctccgctcctcgcttcggcttcggcttcggcttcggcttcggcttcggcttcggcttcggcttcggcttcggcttcggcttcggcttcggcttcggcttcggcttcggcttcggctggcagggtgacggtagccagtgcttgcggttctgcgtcgccggcaatgtccggcgccgaatccggcacagccgcgtccagttgttgcggttgcggcgcagccgcttgcggcactaccggcttgccggccagcgcctgcaactcggccagcaggtcaagggcttcctgccggatcgcggcaagcgtggcttcgtcggcttcggccggcacggcttccggcgcaatatcgccaacgatatcggtgtctgcggacactggttccatggcaggcgcttcgggcactgccactacctcaggttccgggctggtagccggctgcgcgggagcggccacggcttgcgtggcgccagtgggcgccggcgcagcggcggcggcttcggcttcggcttcggccggcgcggatacggcggcagctacggtgactgaagcagcggccgcggcgatactcttgccggaagcctcgggcagcgtcgtaatcgccgaacgcaccagcggctgcggctggcggaacgggctgctgacgaccgtgccgcgcagggactgcgccggccgcggcgccggagccggagccggtgaaggggctgccgtcggggccggcctgcgcgccgccggctgggccggacgcggcgccggtgccgccgccacgggtgcgggcggcgcggcgcgcgccggcttgaccgcgcccggcgactcggcgtggtgcagccagatctcgcccggctgcggcggggattcacgcgtgcggcgcggcggttgccaggcgggctggcggcgcgccgagaccgcctcaaagctgcgatggcgcgtggcgggcgcggtccagccgggggtgcctgccgccggcgcatcgcggcgctctgcgtcgcgcatcggctgggtggcagcaaaggaaaccggcggctcttccggcgccgcgtcaggcgcggcggcgcggcgcggcttgcgcgagaacaggctgcgccaggtttcaccgaacaccatcggcgcggccagcgccagcacgcccagcatcaacagcaaggcaccggtccagccgaacaggttgcccatcatgccggccagcgcgcggccggccgaaccgccagcgctcgattccggatcggtgccgctggtcagcgcttcgaggcaggcgctcgcgcacagcacggcgagcgtgccgagccagacgcgcaatgagccgggccctgccagccggcgctcgccggcgagccagcgcgtcaccagccgccagaccagcggcactatccagaaagtcgaaaatccgaaccagccaaaacccattatcgacatgccatgttcaaaactacgggcagcgattgtagcggttatggcaggcggcgattgaatcggaaagcgcaaatattcgtaacgcagcgcgtttccggggcgattgcgcaacgatcccctgtgcgattccgcatgccagcggcgccagactttgcgccatccggtggttggcgcagcggcgccgcgctaccatgcggcaacccccaatcgaattgcactccggcggcccgccgccttcccctcccccatgccgatccgctacgccaggctgcgcattcttgtcgtcgaagaccatccgttccagcgcgtcgcggccaaggggctgctgcggtatctgggcgtgcagaccctggtttcagctgaaaacggcacgcaggcggccgagatccttgcacgccaaccgttcgacatcgtgttctgcgacatcgaaatgcctggcggcaacggccccgagctgattgccgaactgcaccggcgcgggcagcatgcctttgccgggacggcgccggtatgggtctgggtgacggcgctggcggaggacatcctggattcaaaccgcggcctggcgcacgccgccggcatcccgcgcgtgcacgcgctgcgcaagccgctgtcgcgcgatgcggtggaagagatcctggccgatgcgctggtgcgccagcctgttagcgaatccaccacgccggcgtggtcgcccgacgacgcagaactggtccccgccacccgctcgggcacggacctgctggtcatgctgcagccccagcacgagattgccagtggccggctggccggtgccgaggcactggtgcgctggcgccatcccgaacacggtctggtgcagcccgacctctttatcccacggctcgaagcgctcgacgcggccgacccggtgttcttcttcgtggcccgccagtgcctggcagcgcagcagcggctgcgcgcggcgggcatccacatcacgctgggcatcaatgcctcggcgcaaaccctgtgccggcccggtgtgctggagacgttcgatgccctggtgaccgccagcggcgtgccgcggcacgcgctgacggtggaattgaccgagggctatccggtgcccgatacgctggcgctgtcggtcgcgctgaaccgcttgcggctgctcggctacggcgtggcgatcgacgatttcggcgttggcatcgccacgctcaggctgctggcggacctgcctttcacgcagttgaagctcgaccgctcgttcgttgtcgaggtcgacgggcatggccagcgtgccgcgatctgccgcaacatgatcaacctggcgcgcgagctgggcctggagtgcgtggccgaaggcgtcgagaccgacgcccagcgcgcagcgctgctggcgctgcgctgcccgctgggccagggctacctgtggtccgcgcccaagccggccgaggtcttcatcgcggatgccatcgaccgggcggcagtcacgccggcggcgtgagctggccctactgcgcggcccggaacggatacttggcaaagatctgcgccacggtcttgtcgatgcgctgctgggcactggtcttgtcgctggtgtccacgctgcccaccgccacgccttcccagaccagcttcatctggcgccggtcgaccaggtcgatgttgaccgtgccttcggtgtaggtatagacgtcgttatagaagccgtagcccggccacggcgcatacagcccgccgcgataaccgtaataccccatcatcggcgtcggcgccgggctgacctggaccttctcctgcagccgggcattgaagttgaccagcaagtccggcgactgcgccgcatagcggtagccgcgcgcggtcagttcccgctgcacggcagacttgaagtactgggtggtcaggctttcatagccctggcggtcggtgccgagatgctcgacgaagccaaagctgcggtaggcactgaagtcagtgctgcgattgtagtcagtcttgatgtcgggcacgctggcgcagcctgacaggaccagcgccgcggccacgacgggaaagagctgccggaagggtttcacgatacatctccatgatgtccgcggcagcgcgcacatgcagccacgcgcaagcgccaccggcgccggaacgccggcgcaccgtacgccatctgacccgatgggctagtgtcctgttccgcagatggcttgccaaaatgaaatcgtccagttgatcgtcaggctaaacgcgaggaggcgccatagccgtagctatggcaacgacgagcaacgacgcatggcggccaactgggcgatttcatggcaaggtatttgcggaacagggcactagttcagcttgccattgatgccgcccacgctgaaccggcccgcccccagcagggccaccgccagcgccgcggccaggaacatcccctgcaactcaagcgcccagccgccggtatcggacagcatgccgagctgcttggtatgcaccagcgccaccgcaaacaccatgttgatggcaacgatcagcgccgccagccggctccacagcccgatgatcagcaggatcggggccacgacttccccaatgtagacgccgtaggccagccatgccggcaagccggcgtcggcgaccaccttccccacaaagcccatgccggacgcaccggtcagcttggcgatgccgtgcatcaggatcaacacgccaagcacgatgcgcagcagcgccttgcccaagtcctgggaaccctgagagccacccatggccgttctccttgccgttgtctgtcgagttggttgtcgaagccaagcgcctttaccctcacgcgcaaggttcgccccctgtaccttagtgcgaggcggcgtgaaggtaaagccgcaaatacgagactgcctggtggccgggatgcgaccggcacaccacctcgccaatcccgccatgccgtatccggaaggcctgcgctacaccacccggtgcatcgctggctgccgcggctcaagcatgccgaccttgtatgcgcattcgggcaggacctcgcccagaaagtcgagaaagcgccgggtggcaggcgtcacgcccttgcgggaggggaacaccgcgtgcagcgtgccgaccggcatgtcgtactgcggcaacaccagttccagctcgccgctttccagcgcatcgcggcaatacatccgcggcagcatggccacgcccgcgccggcgatcgccgcctcgcgcagcagcacgaagtcttcggtgaccaggcgcggttcataggcaatctggatcgagtcgttggtcttgcagcgcagggtccagacatgcttgccgtcgtgcggcggctggcccacgccgggcatgccatccagcgcctgcggtgtgcgcgggcggccgatgctgtccagcagcgcggggctggccaccagcatcagctggctttcatcgaaggtgcgcacggccaggctggagtcctccatggactcgcgcacgcgcagggccaggtcgaagccttcgccgatcacgtccacgcgccggttggtggtctccagctcgatccgcacggccgggttggcgcgcatgaaatggccgatggccggcgccagcaggatctgggcgatggcgatcgggcagctcacgcgcagcgtgccgccaggctgctcgcgcgcctgctcgatgacctcgcgggccgccttggcctcattgagcatggcgcggcagcgttcgtagaaggattcaccaagcggcgtaacgcgcacctgccgtgtcgtgcggcgcagcagctgcacgcccaggtcgcgttccagctgggcgatgcgccggctcaggcgcgacttgggcacgcctgaggcgcggctggccgcggaaaaactgccgtgttcgaccacctgggcaaacagggacaagtcgttgaggtcttgcatggatggctccgggatcacgtgcggccgccaggctggcgttgcgccggcagaacaatcatttgcattttgcctcactaccgataccaatggccagccgctatctttcatccatcgcaaccgcacaccttgtggagatagacatgaacatcctgcagatcgattccagcgtacttggcgacaactccgtttcgcgcagcctgaccgccagcgtggtggccgacctggtcgccgccaccccggacgccaaggtcaccgtgcgcgatctggaccaggacgctccggcacacctgtccggcaacctgctgcccgtgctgggcggcccgaaggaaggcctgagcgccatccaggaagccgagctgcagcgcaccgagcaatggctggccgaattcctggccgccgacgtactggtggtgggcgtgcctcagtacaacttcagcatccccagccagctcaaggcctggatcgaccgcatcgcgcaggctggccgcaccttcaagtacaccgagaacggcccggtgggcctggccggcggcaagcgcgtgatcgtggtgtcgtcgcgcggcggcgtgcgccaggatgccaatgaactggacctgcacgaaaagaccgtcgacatcgtgttccgcttcctgggcatcaccgacatcacctacgtgcgtgcccacggcctggccatgggtccgcagttccgcgaagccggcctggccagcgcccgcaccgaaatcgcggcgctgaacgacgccagccgcctggccgcctgaagtcctgtggacggccggcgctgcaggacggcgccggctcgccccgcggacggatcgggtctatgatggatcggggcgctatggcgccccgcgtgccatgggcggcgcgccggccccggctatttgcccgcggctgtcgtgccgcctgcagtcatcgaccgatccactcccgggagcccgcatgacttcagccctgttgccagccgccgccctccatccgccgcacgaacccgccctgctttcacagtatcgccacgtacgcacggccaccgagaccctggtggccgacctgtccgatgccgatgccaccgtgcagtccatggacgacgccagcccggcaaaatggcacctggcgcacaccacatggttcttcgaggaattcgtgctggctgcgcggatcccggactacgagctggtggacccggactaccgctacctcttcaactcgtactacgaagcggtcggaccgcgccacccgcggccgcagcgcgggctgctgacccgcccctcgctggacgaggtgctggcctaccgcgaggccgtggacgaatcgatgctgacgctgctgggcagcgcccagaccgatgacgaggcagcgctgatcatgcttggcctgcagcatgaacagcagcaccaggaactgctgctggccgacatcctgcatctgttcgcgcagaacccgctgcgccccgcctttgccccggaactgcccgagccggtgatcgccgaccctcggcccgcgccggactggatcggctttgacggcggcctggtggagatcggccaccgcggcgagacctttgcctttgactgtgaaagcccgcggcacaaggcctacctggcaccgttcacgctgtgctcgcacccggtcagcaaccggcaatggtttgaattcatcgaggatggcggctaccagacggcggggctgtggttgtccgacggctggcgctgggtgtgcgagcaaggcatcctggccccgctctactgggaagaacgcgaaggcacgtggtggcagatgacgctgcgcgggatgcatccggtcgacccggacagccccgtcacccacgtcagcttctatgaggccgaggcattcgcgcgctgggccgaacgccggctgccgaccgaggccgaatgggagcacgcggcgcgcagcctgccggccaccgggaattttgttgaaggccgcgcgctgcggccgttgccggaccggcagaacacctcgggcgtgctgcgccagatgttcggcgatgtgtgggaatggaccggcagcgccttcctgccgtatccgggcttccgcccgaacggcggtgcggtgggcgagtacaacggcaagttcatgagcggccagatggtgctgcgcggcgggtcttgcgtcacgcccgaatcgcatatccgggcgacgtaccgcaacttcttctatccgcaccagcgctggcagttcaccggggtgcggctggcggacgatgtctagcccggcgccagccagcgccacgccagccaggccagcaacacccacaccagcacgatgaccacggcggccgcgcgattgcgcggccgttttgcatgcgtggcctgccacgcctgggcccggccgcggcattcatccttgaccgccggcggaatcatccgcagcgtcagccagatacccagcggcaccagcagcacgtcatcgacatagcccagcaccgggatgaaatcggggatcaggtcgatcgggctgaaggcataggccaccaccagcgcggccagcagccgcgcgctccacggcgtgccggggtggcggctgcagaaccacagcatcagcaggctcgccttgagcccgcgcgcccactggcgcaggcgtgcgccgacggccatcgccggcatcagcgcttaccagcccttggtcttgggctgctgcgccgcgggttgctgggccgcaggccgctgcccgcccggctcgccggtgggcgccttcagcggcggcgccgccgcgatcggcgtctgcgggtacagcttctgccagcgcgccttcaggcccttggcgatctctgcctggttgtagcgctcggcaaagtcgatcacggtcatgccctgctggttcttcaggcgcatgtcggcgccctcgtccagcagcagcttgacggtctcgatatggccgccgcgcgcggccatcatcagcggcgtggtgccgttggggctttcagcgtcgatataggcggcatggtcgaccaggtacttgactacgtcgttgtggccattggtggccgcatagtgcagcggggtccagccggtcttgttgatctcggcctccatctcgtcgaccatcagcttgaccatgtccagctcaccctgcagcgcggccatcatcagcggggtctcgccggccgggttggccttgtcgaaatcgatgtccttggcgcggatcagcaccgtggccgccttcagcgacttctcgcgcagcgccagcaccagcgccgggttgccgcggctgtccaccagattgggatcgacgcccttggccagcagcttcttgacggtgttggcgtcgtcgaattcgacggccttgcgcatgtcgtcggcaggcgcggcctgcgccagcgtggcggcggccagcgcaagggcgccggcagcgcgtcgggcaaacttcatgtcaaacatgcgattccctgtcaatatgcttgaatagcttgaagaaattttccgtcgtctgttccgcgacctgttccacagggatcccgcgcagctgcgcgatgaactcgcccacatggcgcacccaggcaggttcgttggtcttgccgcggtatggcaccggcgccaggtagggcgaatcggtctcgatcagcatgcgctccagcggcaccttgcgcgcggtttcctgcaggtcggccgcgctcttgaaggtgacgatgcccgagaacgagatatggaaaccctcatccagcgcctggcgggcgacgtcccaggtctcggtgaagcagtgcatcacgccgccggcctcgcgcgcgttctcttcgcgcatcaggcgcagcgtgtcgtcggcggacgagcgggtatggatgatcagcggcttgccggtctggcgcgcggcgcggatatgggtgcggaagcgctcgcgctgccattccatgtcggcgatgctgcggccgttcaggcggtagtagtccagcccggtctcgccggtgccgaccacgcgcgggtgggcggacagctccaccaggcgctccagcgtgggttcctcgcccccttcgtagtccgggtgcacgccgaccgaggcgtacaggttgggatgctgctcggccagcgccagcacgcgcgggaagtcttccagcgtgaccgagatgcacagcgcatgcgtgacctggttggcgcgcatgttctccagcagttccggcaggcgcgcggccaactcggggaaatcgatatggcagtgggaatcgacaaacatggggaatctctgttggcgggtggctcagtccacgcggcggccgacgatgatcaggtcgcgctcgacaccgtcgagcacggcaacgcgcggcaggtcgccccagcgcgtaaagcccagcgacgcgaacaggcccaggctgggcgcattgtggccgaagataaagccgagcagcgtgttcaccccgaccctgggcgcatggtcgatggcctgttgcagcaggtagcggcccagcccctggccgcggcgctgcgcgtccaggtagatcgacacctcggcggtggcgccgtaggccgggcggccgtagaagtctgaaaagctcatccagccggccatgcggccgtcggcatcctcgcacacccacagcgggcggcgttcaggctggtgggaatcgaaccaggcctggcgcgaggccacggtgaccggttcggtatcggcggtgaccatgcgcgagggcacggtgctgttatagatggcgacgatgcccggcaggtcgcggggctcggcaatgcgaagtgaaaaattcattgaaaatcaatatattgtgagaacaacctcacaacgttcataaagtttgcgtggggcgcccggactccagcatcttgcccaggatctcctccaccgcgcggcgcaggttgcgcccgttgtcgtcgtcggggaaatgcacgccgacgccgggggtcttcatcggcgtgcccgccggggtgatccaggccacatggcccgcgatctggtatttctgcggccggtccagcagcgacagcaccaggaacacctgctcgcccagtcggaacggccggttcgacggcacgaagatgccgccgcgcgccaggaacggcatataggccgcatacagcccggcctggtccttgatcgacaaggacagcacattggggcgcgatgccgccccgctgccggttggcgcagcgggcggtgcgccggcgactgctgtgttcatggttgaccccctgaatgacggtgctgcttgttgttatgcattattttgactgccaggcgtactaccggaacagctggcggtattccaggaataccgcttccatcaccagccgggccgccagcggatggttctcgctgcggcgatgcgcggtcaaccgggtggcaaaggcctgcaggcggtgcgcgtcggtggccccggcgcagcgcgccagcaccgcccgttccttgggcaggtaccgcggcgtggcgctgccgtccaggcgcagcgtcagcagatcgtacgtccagcgctgcaggatgccaagcacggcaggcaccggcagcttctgcagttgctcggccgccgcggaagcgtcgaaggcggcggcggcgccgagctggccgaccagccagcgctgcagcggctgctcctcggcctcggccgcatgcagcgcggtcagcggcgagccgccggccagcgccagctgggcctcggcatcggccacgccctggccgcgcagccaggccagcgcggcctccggcgtcgggcgctgggccgagaactggcggcagcgcgacaggatagtcggcaggatgcggtcgaggcggtcggtcaccagcaggaatacggtggacggcggcggctcttccagcgtcttcagcagtgcgttggcgccctcggtctgcagcgcatcgagcggatagaccaccaccacgcgcagcccggcccggtgcgtgcccacgcccacggcctcgatcagcgcgcgcacctgctccatgcggatgatcttgctgggcgccttcttcttgccgccctcgtcggtctcggcctcggccgcggcgtccagcgcctcgggccgcaccacggtgaagtccgggtggttgccctggctgaaccagtggcaggcggcgcactggccgcagggctggccgtccggcagcggcgcctcgcacaacagcccctgcgcgaaatgcagggccaggtcgcgcttgccgatgccttgctggccatggatcagcaaggcatgcggcagccgttcacgcagcgcgccaagccgttgccagtcttccttctgccagggatatagcatgtgaatcagtgggttagcgatctaacttcaagttttacctgtgataaccatgcgattgcgaattacgcaatggcgcggcattcacacctatcacgtcagccatatatcggccaaaaatcagatagttgcgatgattttttcaagttcatcgcgaatgtcggcaatgctgcgcgtggcgtcgatcacccggaagcgctgcggcgactgggccgcgcggcgcaggtattcatcgcgggtgcgctggaagaacgcgcgcgattcggattcgaacctgtcaggcgcgcgtgcgccggccaggcgctcgctggcggtttccagcggcacgtcgaacagcagcgtcaggtccggctgcaggccgccctgcacccagtcttccagcacttccaggcgctcggtggccaggcccctgcccccgccctggtaggcgaaggtggcgtcggtgaagcggtcggaaatcacccacttgccgcgctccagcgcgggtgcgatgacctcggcgatatgttcgcgccgggccgcgaacatcagcagcgcctcggtttccaggtgcatcttgcgatgcagcaggatctggcgcaggtcttcgcccagcgaggtgccgccgggctcgcgggtggtgacgacgccggcaatgtcgctgcgtgcgcgcaggcggtcggcgacccagtcgatatgggtgctcttgccggcgccgtcgatgccttcaaacgtgatgaattttccgcgcatggaatgcctatttgccgcgctggtacttgtcgaccgcgcggttgtgttcgggaagcgagttggagaaatggctgctgccgtcgccgcgggcgacgaagtacagtgcgtcggatggcgccggcgtggtggccgccgccagcgaggccagccccggcagcgcaatcggcgtgggcggcaggccggtacgggtgtaggtattgtacgggttgtcggcctgcaggtcgcgtttgcgcaggtcgccgtcgaagccatcgcccaggccgtagatcacggtcgggtcggtctgcagcatcatgttcttgcgcagccggttgatgaacacggcggcgatcatcgggcgttcggcggcctggccggtttctttctcgacgatcgatgccatcaccagggcctcgtacggggtcttgtacggcaggtcgggcgagcgtgcgttccaggcctcgttcaggcgccgctgcatggcacggtaggcgtgcttgtacaggtcgatatcgctgctgccgcgcgcgaacaggtaggtgtccgggaagaacatgccttcgggcgaggtctcggccgcgccgattgccttcatcagctccgcatcggacatgtcccgggtgtcgtgccgcagcgccgggctggcgtccacggcggcgcgcatcttgcggaattcccagccctcgatcaccgtgaccacatagtgcgtgacctcgccgcgcgccagcttgccgatgatcgacagcggcgtggcgccggtcgcgaattcatagccgccggccttcaggtcaggcccgtggccggtcaggcgcaccagcagcatgaacagccgcgggtccatgccgacgccgccgcgctggatctggcggccgacgctggcgacgccggaattgggcttgatcaccacttccacgggtgacttgctgaggggcagcgggtgattggcccaccacgcgaacgcgcccgcggccgccagcgcgaacaccaggatggccaggccaagactaaggaaaaatcgtttcatgtatcagggataggggcggctgaccggatccgtcggagggcttgcgcgccaccgcttgccgccacgtgctgccggcgccggccgaaaatctcatagccccatataataaccggcagcctcgcaccgaccatgcgccgcggcgccggcgccgcttgacggcccgcccggcacggcgcacgaccggcgccttccctctcccgaattgcctcaacgattgccacgcaatgccagtgatgaatgcccaagcccaggaactcgccgcaaaccttgaagccttgagcggcagcggcatcgtctgcagtctgcccgggcttggcctggtccgtgtggccggcgacgatgccggcagcttcctgcacacccagctgaccaatgcggtcgaagacctgaaggccggcgcggcccgcctggcgggctattgctcgcccaaggggcgcctgctcgccaccttcctgatgtggcgcgatgtcgaaggcatcgtgctgcagctgtcggccgacatccaggccccggtgcagaagcgcctgtcgatgttcgtgctgcgcgccaaggccaaattgtccgacatcacccccacccatgcgatcctcggcctcgccggggccggcgctgccaaggccctggccgctgcgggcctgcccgtgccggaggtcgcctttgccgtggccgaagccgacggcatcaccgtgatccgcctgccggatggcgccggccagccgcgctggcagctggtgctgccggccgagcgcgccgaggcggtgcgcgcggcacttgccgcctcgctgcaggatgcgacgcccgcgctgtgggactggctggaagtgcagtcgggcctgccgcgcatcgtcgcggccacgcaagagcagttcgtgccgcagatgatcaatttcgaactggtgggcggggtcaatttccgcaagggctgctatcccggccaggaaatcgtggcgcgcagccagtaccgcggcacgctcaagcgccgcatgtggctggtgcagggtgaaggcgaagtgccggcgcccgcggctgaaatctaccgtccggaagatccgggccagccgtgcggcatgatcgtcaacgccgcaccggcgccccagggcggctgggccgggctggccgagctgaagatcgatgccgccgccagtgcgctgcgcctgggcagcgccgagggcgcggcagtggctacggccaccctgccctacgaggtgccgctgggcgaggccgcccaggccgctggctgaaacccacaggacctgccatgagcgatcacctctacgtctatttccgcgtcccggaagccgttgccgccgaggcgctgccgcactggcaccgctggatggagactgtcgccgaagcaaccggaattggtggtacgctgatgcgcaggccggaaacccgcgccggcgtgcagacctggatggagtgctatcccgacgtgccgcccgcgttcgatgccacgctggaaggcctgtggcggcagagcgggctggaccaatgggtcgatggcgagcggcgggccgagcactttgtcgacctggacgtgctgtaggcgtccaggatgccgttggactgaagtacgccgggtgccactgcagccaccccggcggcaaaggaagcaaagcgatgtgtctgatcctggttgcctggcaatcccaccccgactatgccctggtcgtcgccggcaaccgcgatgaattctatgtccgccccgcggcggccgcgcactggtggcaggatgcaccgcaggtgctggccgggcgcgacctggcggaagtcatcggcgagcccggcacctggatgggcgtcaacgccgacggccgcttcgcggcactgaccaactaccgcgccccgtccgaaaaacgcaccgacgcgcgctcgcgcggcgagctggtggccggtttcctgcgcggacgcgaggcgccgttcgactacctggacggcctcgccggcgaagacggccgctacaacggcttcaacctgctggcgagcgacctgcgtgaactctggtggtacagcaaccgcgccgcctcgcgccagccgcaacggctgcgcccggggctgtacggcctgtccaacgccctgctcgacacgccctggcccaaggtgcgcagccgcgtgggcgcgctggccgaagtgctggccgccgacagcggccaggccaacgccagcgccgagccctacctgcaaatgctcgccgacgagcgccaggcggcggatttcgaactgcctgccacgggcgtggcaccggaatgggaaaagctgctgtcgtcggccttcatccgctcgccgctgtacggcacgcgcgccagcacggtgctgcgcgtgcgccacgatggccgtttcgacctgagcgagcgcagcttcgacgccgacggccgcatcggcgacgtcaacttccacggcaagctgaacctgcaacgcgacaccggcatcgtgccagcgccgcgctgaggcccgctggaaccgaggattccggcgctcagccggccagccgcttgcgcatctccacgtgcgggatgcccgcctcttcgaattccggccccacctgcgcaaagcccacgcgcgcatagaatggcgccgcgtgcgtctgcgcattgagcaccagttccgggtagccaagcgcttcagccttgcgcatcagcgcgtccagcaccattgcaccgacaccggtgccacgcacggactgcagcaccgccatgcgcccgatatggccatccggcagcagccgtccggtggccaccggcgtgccatcctcggccagcgccagcgcgtgccagctcggctcgtcccactcatcccattccagttccaccggcacgcattgctcttcgacgaagacggtgtaacggatggcgcgcgcgcgttcgcgcgcttcggaccaggggcagatcaggacagtgatggacatggcgtgtggaatcaggcgcttggagaacgattgcgtcgggcaggggatgcggacgggcgcccatgatacgccagtgtcgcagtgaccgtcgatgcaccaaagcggatcactcgccgcatctccgctcttgaagttgcaccatatcagggtttgcccggggtcggcagcgtcctagcaaatttgtatgatgacctgattaccgaataacccgggaagctgccgtgttccagaaagtccctgcccgcgccctcaccgacaatgtcgccgaacaactgctggacaagatccagagcggcgcctttgcccgcggcgacaagctgccgaccgaggcggtgctgtccggggaattcggcgtcagccgcaccgtggtgcgcgaagccatctcccggctcaagtacgaaggcgtggtggagtcgcgccagggcagcggcgtgttcgtgacgctacaggccggcatccggccgctgcgcatcgactacaccgaaaccggcacgctggaatcggtgctgcagatcgtcgaactgcgccgcgcgatcgaggccgaggtggccgcgcaggccgcccgccgccgcaccgatgcgtcgatggcggccatcgacgccgcactggcccggctcgacgaagaggttgcgcaaggcggcgacggcgtggccgaagacgtggccttccaccgcgccatcgccgaggccaccggcaacccgtatttcctgaagacgctggccttcctcagccagtacctggaagcggccacgcgcgtgacccgcaccaacgaggcgcgccgcgcggacttttcgcgccaggtgcgtgaagaacaccaggccatcgtcgccgccatccgcgccggcgacccgctggccgcgcgcaatgccgcgcagaaccatatgtacaacgccgcgcaccgtctcgcccagctgggtgcggacgagagcggcgaagcgcacggcgccgccaactgacgcgcgcgcaagcccgaaccatcgaattatccgtatctgtttcaggagtcccttcatgtccaggaatatcggcgtcatcggccttggtgccatgggctttggtgtcgcgcagtcgctgctgcgtgccggcttcaacgtgcacgcgtgcgacctgcgccccgaagtgctgcagcgctttgccgatgccggcggcgtgccgtgcgcctcgcccgccgagctgggcagccgttgcgacgtggtgctgacgctggtggtcaacgcgcagcagaccgaggccgtgctgttcggcgccaacggtgccgcggccgcgatgcagccgggcaagctggtgatcgccagcgccaccgtgccgccgggctttgccgaggcgctaggccgccggctggcggaacagggcctgctgatgctggacgcaccggtctccggcggcgccgcgcgcgccgccagcggcgaaatgaccatgatgacttccggcccggccgaagcctactcgctggccgaggacgtgctggccgccatcgccggcaaggtgtatcgcctgggtgccgcgcatggcgcgggctccaaggtcaagatcatcaaccagctgctggccggcgtgcatatcgccgcggccgccgaagcgatggcgctgggcctgcgcgaaggcgtggaccccgatgcgctctatgacgtgatcacgcacagcgcgggcaactcgtggatgttcgagaaccgcgtgccccatatcctgaagggcgactacacgccgctgtcggcggtcgacatcttcgtcaaggacctgggcatggtgctcgacaccgcgcgccacagcaaattcccgctgccgctgtcggccgccgcgcaccagatgttcatgatggcgtcgaccgccggccatggcggcgaggacgactcggccgtgatcaagatcttcccgggcatcgaactgccgggcaaggctgaataagggagaagcgaagatgaccgcaggcaccctcgcccatcgcccgctgttgggctgcatcgccgacgatttcaccggcgccaccgacctcgccaacacgctggtgcgcaatggcatgcgcaccgtgcagaccatcggcctgcccgacgtgggcgccgtgcaggacattggcgaagccgatgcgctggtggtggcgctcaagtcccgcaccatcccggccgtcgaggccgtggcccagtcgctggccgcgctgcaatggctgcgcgcgcagggctgccgccagttcgtattcaagtactgctccaccttcgactcgaccgatgccggcaatatcggcccggtggccgaggcgctgctggcggcactggacagcgacttcaccatcgcctgcccggccttccccgaaaacggccgcaccatctttcgcggccacctgttcgtgggcgatgcgctgctcaatgaatcgggcatggagcaccatccgctgacgccgatgaccgatgccagcctggtgcgcgtactgcagcgccagagcaagaacaaggtcgggctgctgcgctacgacgcggttgcgcgcggcgcgcatgccaccgccgagcgcatcgctgcgctgcgcagcgacggcgtgcgcatggcgattgccgatgcggtgtccgacgcggacctgttcacgctgggcgaggcctgcgccaacctgccgctgatcaccggcggctccggcatcgcgctgggactgcccgagaatttccgccgcgccggcctgctaccgcagcgcggtgacgcggcctcggtgccggccatcgacggcccgggcgtggtgctggccggcagcgcctcgcgcgcgaccaatggccaggtagcacgctggctggagcaaggccgcccggcgctgcgcatcgacccgctcgcgctggcacgcggcgaagccgttgccgacgcggcgctggcctttgccgccggtcatggcgaaccggtgctgatctacgccacctccagccccgacgaagtcaaggccgtgcaggccgaactgggcgtcgagcgcgccggacacctggtcgaacagtgcctggccacggttgccgccgggctgctggcacgcggcacgcgccgcttcgtcgtggccggcggcgaaacctccggcgcggtggtgcaggcgctgggcgtgcgcgccttgcgtatcggcgcgcagattgcaccgggcgtgccggccaccgtcacgctggatgccaagccgctggcactggcgctcaagtcgggcaacttcggcggcccggatttctttgacgaagcgctgcgccagcttggaggtcactgatgagcaccgaaagcaagctgcgcgaagagatctgccgcatcggcgccagcctgtaccagcgcggctataccgtgggctcggccggcaatatcagcgcgcggctggacgacggctggctgatcacgccgaccgatgcctgcctggggatgatggacccggccgcggtcgccaaggtggccaccgatggcagctgggtctccggcgacaagccgtccaagacgctgatgctgcatcgcgcgatctacgacaacaaccgcgaggcgcacgccgtggtgcatacgcactcgacgcacctcgtggccctgacgctggccggtgtctggcaaccggacgacgtactgccgccgctcacgccctactacgtgatgaaggtcggccatatcccgctgattccctaccatcgccccggcgatccggccgtggccgcgcgcgtggccacgctggccgcgcaggtgcgtggcgtgctgctggagcgccttggtccggtagtgtgggaatccagcgtctcgcgcgccgcgttcgcgctggaagaactggaggaaaccgccaagctatggatgacgatgaaagacacgccgggcttcgccgcccgcgctgcgctgcccgacggcgcactgactgagctgcgcgacgccttccaggcgcgctggtaacaaccgcttttccccgataaacgacggcttcacccggcgcggttgccttgcggccaccgtgcgggggacgcgcatgcctgcagtccgcgcgccgccgcattagacccaccaccatacccggagaccaccgtgaatccaaaccaaccggcggcaagcgtgcccgcccttgacagcctgggcggcaacgcccggctggacaccgaagcccagatcgaaaaacgcgcctacagcaaggtgttctggcgcgtcatgccgttcctgatgctgtgctacgtggtcgcctacctggaccgcgtcaatgtcggcttcgccaagctgcagatgggccaggacctggccttctccgaaaccgtgttcggcctcggcgccggcctgttctttatcggctacttcctgttcgaggtgcccagcaacctgctgatgcatcgtatcggcgcgcgcatctggatcgcgcgcatcatgatcacgtggggcatcatctcggcgctgttcctgttcgtgaagacgccgacccagttctacgtgatgcgcttcctgctcggcctcgccgaagcgggtttctatcccggcgtgatcctgtacctgacctactggttcccggccaaccgccgcggcaagatgatcgcgctgttcatgtcgggcatccccatcgcgggcatgttcggcaatccgctgtcgggctggatcatggacgcgttcaacggcacgcacggcatgcgcggctggcaatggatgttcctgctcgaggccctgcccgcgcttgtgatcggcgtggtgacggtgttcgtgctgcgcgacggcatcgacaaggcgccgtggctcgacgccgatgaaaagcgcgtgctcaagcgcaatatcgaggaagaccagcgcggcgcccataacgccgccagcgccgccggcaaggcccacggccactcgctgggcgcggtgttctccgaccgccgcgtgtggtggatgtgcctgatctacttctgcttcgtcaccggccagtacgcgctgaccttctggatgccgacgctggtgaaggccagcggcgtgaccggcaacctgaacatcggcctgctgtcggcgatcccgttcatctgcgccgtgatcgtcatgaacatcctgggccacagcgccgacgcacgccgcgagcgccgctggcacctgatcgtgccggcgctgatgggtgccacgggctttgccattgcggcctcgttcaccaacaatacaacggtggccatcgccgcgctgtcgctggccgccgccggggtgctgacctgcgcgccgctgttctggtcgctgccgacctcgttcctgtcgggcattgccgccgcttccggtattgccgtggtgaattcggtgggcaacctggccggtttcgtgtcgccgtacatggtcggcgcgctgaaggacatgacgcaaagtacgcagctgcccatgtacgtgctgtccgcgatcctggtcgtcggcgcagtgctggtgtggctgacgcccgctaaactggtcaaccgctgatcctggccggcccgctttcgacgtagtctcgatcgggccggatccgtaccaccgctttggagttccgaatgccgcgcttcgccgcaaacctctcgatgatgtacaacgagcacgccttcctggaccgctttgccgcagccgcggccgacggcttccgggcggtggagttcctgttcccgtacgagcacgccgccgccgagctgcgcgcgcgcctggacgcgaacggcctcacacaggcactgttcaacgcggcgccgggcgactgggcagcaggcgaacgcggcctggccgccctgcccgggcgcgaggcggatttccgcggcaccatcggccgcgcgctggaatacgccggcgtgatcggcaatgaccgcatccacgtgatggcgggcctgatccctgccgatgccgaccgcgcgcgctgccgcgccacatacctcgagaacctcgcctttgctgccaacgctgccgccgcccagggcgtgaccgtgctgatcgagccgatcaacacgcgcgacatgccgggctatttcctgaaccgccaggacgacggccaggctatctgcaaggaagtcggcgcggccaacctgaaggtgcagttcgactgctaccactgccagatcgtcgaaggcgatgtcgcgatgaagctcaagcgcgacatcgcgggcatcggccatatccagatcgccggcgtgcccgagcgccatgagccggacgtgggcgagctgaactatccctacctgttcgaggtcatggacacgctcggctacgacggctggatcggctgcgaataccgcccgcgcgccggcacctcggccggcctgggctggctcaagccctacctgggccgctgatcgcgaccaaccccaagaacaaccgctcccatcctgccatgaacgtactgattaccggcggcgccggcttcctcggcctgcaactcgcccgcctgctgctgcaacgcggcaccctgaacctggacggccagcccgtggccatcaagcgcctgacgctgctggacgtggtggcgccgcaaggcctggacgatgcgcgcgtgcgcgtggtcaccggcgacctgtccgacccggccgtgctgcgccaggccatcgacaccgacactggcgccgtgttccacctggcggccgtggtcagcggccaggccgaggccgacttcgacctgggcatgcgcgtcaacctggacgcctcgcgcgcgctgctggaaacctgccgcgagctgggccaccagccgcgcgtgctgttcaccagctcggtcgcggtctacgggggccagttgccgccggtggtgcaggacgataccgcgctgaacccgcaatcgtcatacggcgtgcagaaggccatcggcgagctgctgctgtcggactacagccgccgcggctttgtcgacggccgcgtgctgcgcctgccgaccatcagcgtgcgccccggcaaacccaatgcggcggcctcgtcgttcgccagcggcatcatccgtgagccgctgtctggtgttgctgccaactgcccggtggcaccggaaacgccgctgtggctgctgtcgccgcgagcggccgtcgcggcactggtcaatggcatcgaactggccggcgaacggctgggcaaccgccgcgtggtgaacttgccggggttgtcggtcacggctgccggcatgatcgaagccctgcgccgcgtggcgggcaatgccgtggcggaccgcgtgacgtgggagcgcgaagcgcgcgtggagaacatcgtcggcacctggccggcggcgtggaacgcggagcgtgcgctggcgctggggttccagagcgacgcgagctttgatgaggtgattcgcgcctatatggaagatgcggggctggccaagtaagcgaatctcgcctccctgctgcgacggccctaatatttgctgagagccgctcccctctcccgcttgcgggagaggggagcaaacaagcgggatttgaagactcgtcggcacggaatcaccccgccggcttcaccacctcatacccctcgataatctcccgcaccggccccggaatcgccgccgatttctgcgtggccgggtccgcgcacacatagacgatctcaccggtaatcaggtgttcgtcgccgcggaacatctccacccggaacagcatgctcgagcgccccaggcgcgacatgcggccgcggatttccagctcgtcgtcaaagcgcgccgaggcgtggtattccagcgtggacttgaccacgaagatgtccacgccatgcgcgtgcagcacatcttccggatagcggatgcccagcgcgcgccagtactcggtcacgcagatatcgcagtacgtcaggtagtgcgcgttgaagacgatcgactgcggatcgacttcggcccagcgcacgcgcagcgggatgctgtggcgaaaatcctctttggccatcggcctggtctccttgtttgtcgtggcttgtcaaagcaccaggccgccggcccgccggacaggaccggcaggcgcggcggcctggatcgatgatggcggcggcaggctgattgcgcttactgtgccttggccagccccagcttctcgatgatcgccttttccttcttgacggtctcggccgcaaactgcgcgtattgctggctgttcatgtagtacggctccatgtcgaacttggccagcgattcgcggtagttgggcatgtccatggccttcttgaaggcgtcatgcagcttctgcacgatcttcggatcggtgcccttgggcgcgaccaggccgaacggcgaggtctgcacgatgccgatgcccagttccttcagcgtcggcacgctggggaagcgcgccgagcgcttctcgccccaggtcgacagcaggcgcagcttgccctgctcaacgtacggtgcccatgccggcgtgtcggccaccgacatcacgtggccgcccagcagcgcctgcatcgactcggaattgcccttgtaggggatgtgcgagaactgcacgccctgcttcatcgccagctcttccatggtcaggtgcagcgtggtcatcgagcccggcgaaccgtaggtcagcttgcccggattggccttggcgtaggcaatgtactcctgcatcgtcttgatcggcgaatcggccggcaccaccaggccgaacgaatagccggcgaggttgatgatgtagttcaggtccttgaccgggtcccagttgatcttggtggtgtacggcaggcggtagaccggcatggcgacctgggccagcgtgtagccgtccggcgcggtggactgcatcatctgcgcgggcagcacgccacccgcgccgggcttgttctcgacgatcacgggctggcccaggatcttggaggcgttgtcggcgagcacgcggaacgggatatccgtggagccgccggcggtgtagccgatcaccaggcggatcgggcgctgcgggaacttgtcggcctgtgcctgggcgggcatggcggcaaggcccagtgccgcggtggcggcggcgatgcccgcgcgggcgatgaagtggcggcgttgcatttgactatgtctccttgtgctgcaagtcactgctgaaaatggaaggccggggccggtgcggccctgaccgtggctgctggtctagttgtgcggtgtgccgaacgcggcgcgcagcgcggcaacggcctcggcatgtgcctgcgccaccgccggcacgaaccggcccagcttgaagaaatcatggatcatgccggggtagtccgccagcgtggcggccacgccggcggcgcgcagcttctccgcgtaggccacaccctcgtcatgcagcggatcgtagccggccacggcgatccaggccgggcatgtgccgcgcacctcggcgccggcgccgccgccatccagcggggcgaaacgccagtcgtcgcggctggcttcctggtccaggtactgggcaaagaaccagcggatcatgtccgccgtcagcaggtagccatcggccagcgcgcggtgcgacggcgtgtcctggcgtgcacaggtgccgggatagatcagcaactgcagcacgggcgccaggcccgcattgcgggcctccacggcacacgccgcggccagcgtgccgccggcgctgtcgccacccacggcgatgcgcgccgggtcggcaccgagccggccggcttcggcgaagacccagtgcagcacatcgaaggcgtcgttggccgccgtcgggaaacgccattgcggcccgagccggtagtccaccgacagcaccatgcagtccgcctggccacacagcagccggcacagcggatcgtgcgaatcgacgctgccgaccgtgaagccgccgccatggaaatacaccagcaagggcagcggctcggtccagctggcctcgcgcggggtgtacagcctgagcgggatggcgtggccgtcgcgcgccggcgccagcaggtcttccgccatatacacgggcggcgggttgatatcgaggatcggcgcgcttttctcgtaggcgatcttggcgtcctcgggctccatcgcgtggatcggcggccgcttggcgcgcgcgatcagctccagcagcgcggccacctgcgggtcgagcgggctggacggcaggccgggcgtggcgggcgcatcagggctggaagacggtgcggcggacatagggaatgacgcggatccggagccggtgccagcggcgtgcagaagttctgcgcgtcgcccgcatcgggacaagttcgaattgtgaacgatcgttcgattttagtatgatgccagatgttccaggtgcccggcagtacgagataaccccgaaaagtcgctgtcagcctgccacgcggcaagtttttgcgcgatgatcggctgaagcggtcccgagggctccggaaacgcagtagtgcaggtccattgaaacccaagacagcgggcctggcgagcatccgctccaggcccgtgcaaaagacaatttggcggcagatcccggcaggagacaagcaaacatggcgtttatctactatctgacccacatccacctggatttcggcgcggtaagcctgctcaagtccgaatgcgagcgcatcggcatccgccgcccgttgctggtgaccgacaagggcgtggtcgccgcgggagtggcgcagcgtgccatcgatgcaatgcagggcctgcaggttgcggtattcgatgaaaccccgtcgaacccgaccgaggccatggtgcgcaaggccgccgcacaataccgcgaggccggctgcgacgggctggtggcagtgggcggcggctcgtcgatcgacctcgccaagggcatcgccatcctggccacgcatgagggcgagctgaccacctatgccaccatcgaaggcggcagcgccaggatcaccgacaaggcggcgccgctgatcgcggtgcccaccacctcgggcaccggcagcgaggtggcgcgcggcgccatcatcatcctggacgacggccgcaagctgggcttccattcctggcatttgctgcccaagtccgccgtctgcgacccggaactgacgctggggctgccggccgggctgaccgcggccaccggcatggatgcgatcgcgcactgcatcgagaccttcctggcccccgccttcaacccgcccgcggacggcattgcgctggacgggctggagcgcggctggggccatatcgaacgcgccacccgcgacggtcaggaccgcgacgcacgcctgaacatgatgagcgcgtcgatgcagggcgcaatggcgttccagaaggggctgggctgcgtgcattcgctgtcgcacccgctgggcgggctgaagatcgacggccgcaccggcctgcaccacggcacgctcaacgcggtggtgatgccggcggtgctgcgcttcaacgccgatgcgcccacggtggtgcgcgacgaccgctacgcacgcctgcgccgcgccatgcacctgcccgacggcgccgatatcgcgcaggccgtgcacgacatgaccgtgcgcctgggcctgcccaccgggctgcgtcagatgggtgtcaccgaggacatgttcgacaaggtgattgccggtgcgctggtcgaccattgccacaagaccaacccgaaagaagccagcgccgcggattatcggcgtatgcttgagcagtccatgtagcacacagcggcttcccgccggtcagaccgaccaagcggctgtccggcggccctccctccacagcgcaggagacaacatgagcggcgagcacttgcaggtagtccatggcgatatcacccggatggaagtcgatgccatcgtcaacgcggccaatagcggcctgttgggcggcggcggcgtcgacggggccatccacggggcaggcggctccgcgatcaaggaggcctgccgcgcgatccgcgacacgcagggcggctgccccaccggcgaggcggtgatcactaccggcggccacctgccggcgccatacgtgatccacgcggtcgggccggtctggcaaggcggcgaccagggcgaggacgaactgctcgccaacgcctaccgcaacagcatccggctggcggcgcagcaccacctgcgcaggctggcctttcccaatatcagcaccggcatctacgccttcccgcgcgagcgcgcggcggatatcgccatcgccgcggtgcgcgaggcgctggccgcggcgccggagatcgagcaggtcaccttcgtctgcttcgacgacgagaactaccgcctgtaccgcgagcgcttgtcctgagacggatcgcggggcatgccccgcgatctccaccgcctgcgtcagaacttgtggcgcaggcccacgcgcaacaccgcctggctgtcatcggccgacggacgcacgccgttgatcgcggccaccgcgcgcttgccggtggaatcgattcccgaggccttctggtagatcgccatcgcgtagacatcggtgcgcctggacaggctgtagtccgcccccagcacgaactgccggtagctggcgtcattgatgccgctgcccctggcatagtccgcggccacgcccatcagcaatgccggcgtcacctggtacttgaagctgacttccacattgttgaaggtcgcggtgccgcgatagccgaacggattcgggccggacgacaggtctcccaggtccttgaagcgcgtgttggagtacgtggtcccgaccgtggccgcgccgaagctgtacgctgcgcccgcggcaaagacttcctgcgagcgcgccgacgcgtagcccgactgcaccggcgagccgatattggtcagcgtgttcaacggtgccgagccggtggtgttggccgtgacaccggtgccgtagaacgaggtattggggttcctgacgttcaggtagccgatgccgagcagcaacggcccgctgccatagcccgcgcccagcgaccagatctggttgcgcgccgggctgcccgccacgccgcccaggctgtagaccccgccaaaactcaggccgccgtagttctggctgcggaacttgatggcgttgttgacccgggcggagttgttcaggttgtcgatatcgccggggtgggcgttgtagaagccgccccattgcgcgccgatgttgagcggaccgacaaaatccaccaccgagtcgtactggcggcccatggtcaccgtgccgtagttgccggacaggccgacgtacgcctggcgcccgaatatcaggccgccctgccccagcttgccgctgctggcgtcgaagccgttttccagcacgaacagcgccttcatgccaccgcccaggtcctcactgccgcgcaggccgaagcggctggcctggatcacgccgctgaccaggccaaactggtgatggccaccggcgttgttgttgtaggtcaggccttcatcgacgacgccatagagggtcacgctgccctgtgcgcaagccatctgcgcgaatccgccgatcaatgcaaaacctgcaagctgctttttcattctgtttcctccgtctttgaatttgttgccgcacctgttgattcgcgtccctcgcatatgcgccgactgggtgcgggccctcccggaactgccttcgaaaaccactgcaacgacacctgctgagggattccgcccgcgtttcgctggcgatgggcgtgacaaagccgctcacgccgtgagcacggctttgcgccgctggcgcaaagccgaacatccacccctggaaaaatcagaaccaagaaccgccgcgcgttttgaaaacgacgagacgcaggcaggaatgcgcgtcaggccgtcccgcccgacagccgccgcgccttagccatcgaaatggatccagggccggcgcaaccggtccgcgccctggaacgcgtcgatgcttgacgccagcttcagcgtcagcgcgatcgggtccagcccttcaagcagcatctgccgctgctcgctgcccagcgtgaagccgtaccgcgcgcccgctggcgacaccacttccagctgccggaggtcgaccgtcacctgccgcgtggccggcgctgcggcgcagtcgtcggcgagtgcctgcaccgttgccatcggcagcaccaccggaagcaggccgttgcgcacgcagttgttgtggaagatggcaccgaagccgggcgcaacgatggcgcggatgccgaactccttcagcgcccacaccgcatgctcgcgcgaggagccgcagccaaaattgcttccggccagcaggatcgacgccccggtgtactccggctggttcagcacgaacaagggatcggggctgcggtccgtccccgccaggtagcgccagccggcgaacaggccctcggccagcccgtgcctggagacgcgcttcatttcccgcgacgggatgatggcgtcggtgtcgatgttgatgcgcagcagcggcgcggccacgccgcgatgcatggtaaacggctccatctcaggctcctggcggccggcgcgggtcggcgatgcgccccagcacggccgatgccgccaccgtggccgggccggcaaggtgggtgcgggtctgcgggccctggcggctttcaaaattgcggttggtgctgctgatcacgcgctgccggtggccgaagctttcgccgccggcgtagaagcacatcgagcaacccgattcacgccactcgaatcccgcttcacggaacacgcgatccagcccttcggcctcggcggcgcgcttgacggcgctggaaaccggcacgcagatggccgtcacgccgggcgccaccttacgcccggccagcacaccggccgcgctgcgcaggtccgacagccggctgttggtgcaggagccgataaatgcggcatcgatggcgatgtccgccatccgctgcccgggacgcaggtccatgtaggacagtgcgcgctccatggcctggcgcgtatcggcatcgatcgccatggcggggttgggcacggcgccgtcgacggccacgccgtgctgcgggctggtgccccaggtcaccatcggcgccagctgcctgcaatccaccgacagctcgcggtcgaacacggcgtcggcgtcgctgtacaggctgcgccagtgccacagcgctggttcccactgcgcaccggcgggcgcatacggccggccggcgaggtattcgaagaccgtgtcgtcgggcgcgacaatgcccgagaacgccgagaactccaccgccaggttgcacagcgtcaggcgcgcctcgaccggcaggctgcgcaccgcgctgccgccgaattcgagcatatggccgccggcgcccgccgccgagtagcgtgcgatcagccacagcatcaggtccttggcgccgacgcccgctggcagcgcgccgtcgaacgacacccgcatggtgcgcggccgcgtcacgcgcagcgtctgcgtcgccagcgcatgttccgcctcggacgagccgatgccccaggccagcgcgcccaggccgccctgcgtgcaggtatggctgtcgggacagaccacggtggtgccgggcaaggcaatgccctgttccggcgacaccacatggacgatgccctggccgggatcgccgatatcgaacagccggatggcctcgcgcctggcgctgtcgcgcgtgctggtgataaaggcctcgccgcccggcatcagcgtgctgtcgttgcgcccgggccgcgtatcgacgatatggtccatggtgcagaacgccagcgccggcgcgcgcacgcgccgcccggccgcgcgcagcgagctcagcgcgatgctgccggtgcgctcgtgcaggaagacgcggtctatatgcagcaggctggcgccgtccagttcggcaatggcatgcgcctgccaaatcttgtcgaacagggtccggccctgggacatggcgctcatcgctgcgctccgatcgcgcgctcactctccagcgtgtcgatggcgtcgccgctcatgcccgcggccagcagtgccgtgcgcgaatgctcgccggcgcgcggcaggtcgcggtagacgtcgaagcgccgcccgtccatcgcaatcggcagcgccggcagccgcacctgctggcccgagggcagcgtcaccggcaccagcccgccgcccgcgttcaggtgcggatcgtcgaacaggtcttcgggccgggaaatcggcgcgaacggcaggccacacgcttccagcttcgccatcagttcctgcttgccgaagctgcggaacatcggcgccagcgcgcccagcacgcgcggccgctgccgcacgcgtccgtcgttgcggtccagggtggggtcgccgatgaagtcggccagtgcaaacgcctcgcagaacttgcgccactgcgtgtcgctgacgatgccgacaaagaccggggcgccttccatggtctcgaaggtgtcataaaccccccacgccgaactgcgcaccgtcatcggcggagcgggcgtgcccgtcacggcctgctgtgccatgtgctggccgaccaggaaggccgtggtctcgaacagcgagctgcacacatgctgcccgcgtccggtccggtgccgttcctgcagcgcgccgagaatggcgatcacgccgaacatcgcgccggtgacgtcgatcaccgaggcgccggcgcgcatcggcttgcccggcaggcccgtcatataggccagcccgcccatcatctgggtgacttcgtccagtgccacgcgccggtcgtaggggccggcaagaaagcccttggccgagcagtagatcaggccggggttgtgcgccgccagcacgccgtagccgaagccgttctcgtccatcgccccggcacggaagttctcgatcaccacgtcggcgctgtccaccagcctgcgcacggcgtccctgcccgctgccgacttcaggtccgcgcacaggctctgcttgttgcggttgtacatggcgaagtagcccgcgcccgagccccccagccggcgcgtgttgtcgccgccgggcggctcgaccttggtcacctccgcgcccatgtcggcgaggatcatgccgatcgccggccccatcaccatgtgggtgaattcgactaccttcaggccaaccagcggcctttccattgttgtcatccgtcgctcctgctgatcattgccacgccgccaggacggcaggcacgaagcccttgggcaggccggcctccggcgtgtgcccgtaaagcggttcgtccgccaggttggccctgacgatgtcgcgcacgcggaacagcgcctccaggtcgatgccggtgcgcagccccatcgactcgagcaggaacaccaggtcctccgtcaccacattgccgctcgcgccgggcgcgaacggacagccgccgagcccgcccagcgaggcatcgaccgtggtcaggcccacgtcgatcgccgccagcacattggccagcccctgcccgcgcgtgttgtgcaggtggatgccgctcaggtgctgctgcccgatcgcgcgccataccgccagcgtcaggctgcgcacctggcgcggattgccgtagccggtggtgtcggacaagccgacttcgtcgcagcccgcgtccatcagcgcttcggccagcccgaccacgcgcgcctcggcgaccgggccttccagcgtgcagccgaatgcggtcgacagccccgcctcgaagcgcggccgcgcatgggccggcaaggcgcggatgcgttcggcaatgcgccggacctcgcgcagcatctgctcatgggtgcggttgacgttgcgcaggctgtgcgtctcgctgaccgacaccgggatggtgagcttgtgcacgccggcgccgatggcgcgctcggcgcccacgtagttgggcaccagtgccgccaccgtgagcccgccgatgccgagcgcgtgcgccaccacctcggccgtgtccgccatctgcggcagcaccgtggccggaacgaacgagccgacctcgatctcgcgcacgccggcggcggcttccgcgctgatccaggccttcttggccgcggtcgccatcacgcgccgggtcatctgcaggccgtcgcgcgggccgacttcgctgaccagtacgtcgatgttctgcatgtttgctgtcatgggttttcctgtggttgggaatcctgtgccgcgaacgccgcgagaatctcgcccgcgcccgcgctccagacttcaggtcttgccatcacgtattcgagcgcggcttccaggtagcggatccggtgcggctgccccagcacccacgggtgcacggacagcgcgaggatgcgcccgccctgttcgcgcgcttcgtcgagcagcaggtcgcaggcgtctttcacctgccgcgcccacgatgcttccgggtgcaggttctccatcagcacgaagcggtcctccagctcggtcgacagcggcatcgcccacaacttgccgtggcgcgtgcggaacgggtaaggcatgtcgtcgttgacccagtcgcacaggtactcgatgccgttggcgcgcagcagctccggcgtattggcgctctgcagcttgccggggctgagccagccgcggacgtcttgcccgctgagcgtacgcagccggtccagcgaacgccggacgacttccgcctcgacggcttcatccaggccgccggcgtgtgcggtgtccatgctccatgaatggccgatgatctcgtcgccgcgctcgctcaccgtggcgagcagcgacggatacagctcggccagccgcgcattgatggcaaaggtcgggcgcacgccgtagcggtcgaagccgcgcagcatccggtggatgccgatgcggttgccgtagtcgcgcagcgtgtagtggcgcaggtccggatacggcatggtcatgttgcccggcaccgccaccggtttgccggtcgggttcagcgggaagaactgcaggctgacgttgacccacagggccagcgtcttgccgcctggccagcgcaccggcgcgcggcttgccagcatcgaccagtcatagcggtcgtggtccatgccggcgcggcggtgcgggtattgcggggcttgatggtcgcgtggcatcagcacgccctccgcaccgggttggctgcggcaatcgcagccgcggccgtgtcgtagcaatgttcgaggtagtaatcggcgatctcgcggccggtggtgacccagacatccgcgtggccagtgatgtattccagcgcttcctcgaaggcgcgcagccggtgcgggcagctgacctggtagttatgggtcgggatgcacatcacggtgccggactcggccccttccgcatagagccggtcgaagcagtccttcagcatctgcccgtagcggcgcggctcggccttgttcaccacgtaggcgatggtgtcgttcatctccagcgagtacggcagcgagataaagcgctggccgccgcgcacgcgcaccggcgtgggctggtcgtcatggaacaggtcgcaggtatagcggccgcccagttcggcgaacaagtccagagtcgattcgctgtgcgacagcgctggcgccaggtagccggccggcttgctgccggtgcagtcctcgatgatctgcatcgactcgcggatcatctcgcgctcctgttcctcggacatgccgtaggtgtagcgcgtgttgtagatgccgtgcgagaagaactcccactcgcgctccatgcacatcgccacgatctcggggtgatgcacgcacagcgccgccgacagcgacaccgagccgcggatgccgtacttgtccagcagccgcatctggcgctgatggccgacgcggttgccgtagtcgcggatcgagtagcccggcaccgcggggtacggatggggccatgcgcgccggtgcggattgcctggcgggtcgagttcgtagaactcgatgttgggcgcgacccagaaggccagccgtgccccgcccggccagctgatcctggggcggtcctggtagggccagtagtcgtagtagccggggctttcacgcatgtcagtcccccttcgcggtgtgcagcatggcatgctggtcttcgagccagttctgcacctcgagcacgtcgagcacgtcggcgtatttcagcatcaggtcggtcaggttggcgaagtggtagctctcatgcttgtcggccacgcactgctccggcacgatggtgcgatacccgcgtgacagcgaatccaccgccgtggcgcgcacgcagcccgaggtggagccgccggtgatgaccacggtatccacctggtgccacaccagcaacgactgcagctgggtctcgaagaacgccgacggcatcttcttgcaatagaccacgtcgcgcaccggatcgacgtcgacgcggctgtcgaactgcgcgcgctccgacccatgcttgatgttctgcagcgaatccggcgtatcggtgcgggtgccccagatgcccgcatcctcgccggacgccatgtacgccacccgcgtccacaccaccggccagcccagcgcccggaagcgccgcgccagcccgttgatatgcgccagctgcgcgggatcggtctcgtacgcggtcttgaagcggtcggtgcaggtgtaggcgttctgcaggtcgatattgaccagcaccgccttgcgcccgaagccgaagcgcgcccggctggggttggccctgacctcctgccagatctggcgcgcggtcttgtctgacaattccatcggtttgactccgttctttgcttctctgattgctggatgggtacgctcacacgcccaggtaagcggcccgcagttcaggggctgccagcagcgtcccgggcgtaccggagaacctgacttcgccgttttccagcacgtaggcccgcgaggcgatttccagcgacagcgccacgttctgctcgaccagcaggatcgacagtccttccttgtgcaggcggcggaccaggccgaacatctcctcgaccatcagcggcgacagcccgagcgagggctcgtccaggatcagcaggcgcggatcgcccatcaggccgcggccgatggccagcatctgctgctcgccgccggacatggtgccggcgcgctggcccagccgttcgcgcaggcgcgggaaggtatcgagcacccattccaggttggccttgagctggcgcgtggcgcggcggcaggcgcccagctccaggttctccagcacggtcaggttggggaagatgcggcgcccttcgggcacctggatcagtccggcgccgacgatgtcctgcggccgggcccggctgacgtcccgcccgtcgaagcggaccgtgccggaggtgccggacaccaggcggcaggccgtgttgatcagcgtcgatttgccggcgccgttggcgcccagcagggccacgatctcgccgcgattcacctccacgctgacgccgtgcagcacctgcacctcgccgtagccgctgtgcagcccttgcaccgacaacagggtctcaggcatgggcggccgcctcctgctgcgcgccgatgcgctgcgccatgccgtggcccaggtaggcctcgatcacctgcgggtcgcgcgtcacctgcgcgggcgaaccctgcgcgatcagccggccgccggccagcacgaatacgtcctgcgccaggttcatcaccgcctgcatcacgtgctcgatcatcacgacggtcacgccgtcgtcgcagatgccgcgcaccaccgggatcatcgcggcgatttcgccggggttgagcccggccagcacctcgtccagcagcagcacgcgcggccgcgtggccagtgcgcgcgccagctccaggcgcttgcgcccggccacggtcaggctcgaagcgctcttgtgcagctggtcttccagcccgacccggcgggccacttcatcggcgtgtgccagcgccacattgcggccgcgcacatgcaggtgcgcgccgaccgcgatgttctcgcgcacggtctgcccggcaaacggctgcacgatctggaaggtgcgcgccagcccgagccggcagatgacatgaggcgcgagcccgttgagggtgcggccttccagctccaccgtgccctgcgtgggcgcgaggaagccggacagcatgccgaacagggtcgacttgccggcgccgttggggccgatcaggccggtgatgcggccgcgcgcaatggacaggttcacgtcctgcaccgccgccaggccgccgaagcggatcgacagtccgtgggtcgaaagtatggtctgcatcgtcatttcccttgccttatgccctcgccttgcgcaccgatccggccgccccggccaggccctgcggcaggaacatcaccatcagcaccagcagcgcgccgtagatcaccaggctcacgcccggcacatcgcccagcgcattgcgcgtcagctcgttgagcagctgcagcgccagcgcgccgagcagcgggccgaacaccgtggcggtgccgccgatcaccgccccaaccagcgcggccaccgaaaaggccggaccgtaggcgatatgcggatcgaggtattgcaggtactgcgtataaaaaacgccggccgccgccatcagcgccgcggacatggcaatggctaccaacttgacgcgcagcacgtcgatgccgagcgccttcgccgcgtcctcactgtcccgcaccgccatcagacaggcaccgaagcgcgacctgcgcagccaccacgagaggagaaggcccgcggcgacgaacgtcaggatgaaccagaggtagccagccttgccggcaaactggagatgcaaggcaccgggctgcaacggcaactgcatgcctgcaccggcaccggtaaaaccgaccgcattggccacgatgcgcagcacctcggccaccgccagcgtcgccagcgagaagtacgaacccttgagcccgtagcggaacgacagcacgcccacgccgacgccggcgagcgcgccgacgccggtcgccagcaccagcgccagccacgcattcatgccgaacgcgacctgcaagatcgccatggcataggcgccggtgccgaagaacgccgcgtggccgaacgagaactgcccgccaaagccgccgaggatgttccacgactgcgccatcagcgtcatcagcagcaccatcaccagcaggttcagcgcgaagccggaggacagccacagcggcgccgcggcaaagccggccagaacgatggcgatccagccgagcgtgggaagagaagaaattcgattcatgtcaggctcctcgagtcacgccttcgcgccgaacaggccctgcggacggaacagcagcaccaggatgaagatcaggaaaatgccgacctggcccaggctgtcgcccagccacaggccgcccagtgactcgaccacgccgatcagcaggccgccccacagcgccccggcgaagctgcccatgccacccagcacgaccacggtgaaggcgatcagcacgaagccgtcgccgacgcgcggattgacgtagtaggccggcagcaggaagcaggcggccgcgcccaggcaggccaggccgatgccgaaactgagcgcatagacgcgctcgacatcgatgccgaccacgcgcgcgccctgcttttccctggccaccgcgcggatggcgcggcccagcgtggtgcgccggatcatcagcatcagcaggccgcaggccaacagtgcgccggcgaaggcgatcaccttgggcagcgcgatcgatgcacccagcagctcgacggtggacagcgcatagggcgtgtcgatggtgtaggtgtcggagcggaacaggtacagcgccaggttctccagcacgatcgagatgcccagcgtgaccagcagcacgttctgctcgttgccgcgacttgcccgcgcgatcaggtggcgctgcagcaggtagcccgcggcgaacatggccggcagcatcaccagcagcgccgcgtagggatcgacatggagccgggtaaagaggaaatagacgccatacagcgccgccatcagcgcggcgccgtgggcgaagttgacgatatggagcacgccgtagatcagcgtcaggcccagcgcgaccagggcatagatcgccccggtggtcaggccgttgagccaggaggcccagagtatcgggatatcgaacatgtaatgcgttcctcgcggcaacaggagtccagcgtcgggaagcgggcttcccgaccgtagcgactagggataaacggcgtaccggcgcgaccggcgtgaagcgcttagctggccggcagcgggaacaccgcgtcgacctgccggtaggcgttggggaagaccaccttgatgtcgccatccaccacctgcgtcagcagcggctgcgcgccggtgttctggccgttgacgaagcgcgtcggcccgtacggcatgaagtggctgctgaagctgctgctggcgagcgcttcgatcacgcgctcgcgctgcgccgagccggcgcgctcaatgctgtcggccagcagcatggtggacgcataggtgcagaaaacctcgtaggtaaagaacaggccgctggcctcaacgcgcttgcgcagcgcaatggcgcgaggatccctggggttgtaccagtggttgcagtccagcacatgctgcgccgccgccgggaactccttgatgaacttgaagctcgacgccgcgccgcccagcaccgagtagaccgccttgggccggaacttctgctgctgcatggtgcgcatcagcagggcgtactcgttgtagtagttggccgcgatcacgatgtccggatcggccgccttcatgcgtagcacgatattgctgaagtcgcgcgtcgggttggcgtgcttgaccacctccttcacctcgaaaccgaactccggcaggcgctggctcagcagcttggccgtgccactgccgaacagcgattcctcgtggatgatcatcgccgtgcgcgcgcggttgccgctgagctggttgagcgtgcgcaggttgctcatcgcggtttcggtggcgaccttgtagccggggccgaagcggaacgtgttggtcaggccgcgctcgacgatggcatcggccacgcccacgtcgaccacatgcgccaggccatgccgcgccgccgcctgcgtggtggccaggcagatcgcgctggcataggcgccgaccacggcgctgacgccggcctcgttcatcttctcgacttcggccgcgccgatctccggctgcgactgggcatcgcccagcaccgcttccagcctggcgccgcccagcgacttgataccgccggcggcgttgatgtcggcgatcgccagcagcgcgccggcacggcattgcgtgccggaaaacgccagcgctccggtgaccggatgcagcacgccgatgcgcaccggcctgggctgggcccgtccgatctgcggcgccagcgcaccggcgccaagcagcgcggcctggcccaggaaccggcgtcttgccggataagtcttggtcatttctgtctcctcccgatttcttggatcaccgcgtcgcggtggataggtcgcgcgcaagccagatacgcgccttgtcttcgccagcgcgcgtcagcgccatgcggtagtcgtagcattgcgggcgatacaggccgctgagccactggaccgggttgccgtcgacatcgcgcaccacgcgcaccaccgacagcagcgccgcacccaccggctcgtccagcagcgccgcggcctgcgcgtcggccaggcagcaggacagcgtctggtcggcgtggccgatgcgaaccccgccgtcttccagcagcgccagcatgggctgctgctgcagcgcgcccggtgtcagcaacagcgccacgtgcggcggcgaccatgtcgtgatcagcgagaccggttcgtcccggtgcaggcgcacgcgcatcacgtgcagggcttcgtcccgctccgccagccgcagcgcctcccggacgtgcgtggggcagctccgcatgccgaaatcgaccacccgcaccgaggtgccggcgacgacttcgagcaggctgtcgagcaggccgcacatctgcgctggtggcctgttcagccgaacctgctcgatattgacgaatgtcccctgcccgggccgccggtagatcaggccttcctggagcagctcggctaacgcccgccgcaccgtcacccgcgccacgcgatactgctccatcaagcggaactcggccggcagcccgctctcgtcgtataacccgttcaggattttctgccgcagcaccaggtaaatgcggtgataccgcggcatcggcgaattttggtttcccataaatggcggctgctatctttcgacccgttgaaatttatcggttcaccgacatcggatacttcccgttcaggccaattagtcaagggaatatcggctctgaagcatggaccgaaagatatatcagtattattgtcgcttcaataggacaactaataggacatcgtagatattttccccaatgagacatggaatgaaagccagcccttaataaaaagtcaggggtcgtccggattactcagtaaatgcttcagacgttccggaaacaccagcgcgagccggacagcgccaggcatggcgcaccaacaaaaagccccgccatcaaggcggggctgaaagctgctgactggggtttcgttggcggcccgaacgacatctggcagctaccccggcagcgcactccggatcagcaggttgacgcgttccggctgctcatggatcacccagtgcgtgccctcggggatgcgttccaggcgcaggtcaggcacgaagtcgcccagcccgtccaccagcgacttcggcagcgcgcggtcgcgttcgccccagatcaccagcgtggggaccttgaccacaaacgcggccggatccaggcgcgagatatcgggcggcggctcgccctcgcccggcgggtgcatgggcgaggcgcggtagaaattgacgccgccggtgagcggatggacgccggcgtcctggccttcgcccggctgggaccatgccgcgtggtacctggcgcgcgtctccggcgtgtaccatgccgccggcttgccgtcggcatcggcaagcatccggtccagcagcgcgaagtcgttggcggccagcgccttttccgagcccggcttgcgcagccagttcatgtaggcggaagcggcctgctgctcgggatcggtggccagcgcgcgcgcaaacaggtacggatgcggcgagttgacgatgacgagctggcgcaccagctgcgggaactggatcgccaggttccagcagatcgccccgccccagtcgtgcgccaccaccacggcctggtcatagcccagcgcgctgaccagctgcaccaggtcttcgacgatatggcgcggccggtaggcctcgacctcggcgggcttgctcgacaggttgtagccgcgcaggtccggcgccacggcaaaatgcgtgcgtccgaactcggccagctgggcctcccattcgaaccagaattcaggaaagccgtgcacgaacagcatcagcggcttgccgcgctcgcccgcgctggcgtagtgcaggcgggtgccgttgggcagcgtggcgtactgcaggtggcggatcacggcggcgggggcagccatgttgttctccatatgcggtcctcctcgttgtggcgttgtgctggcgtcagccgcgcagcgcggcaacgaggcccgcgcggacctcgggcttgtcggcaaacggatcgccgggattgcgctgcccgacgatgtcctcgaagcgctggcgcacgggggcgagcgcctgggggtgggaataaatatagaagctttcgtcgcggatggcatcgaaggtcagctgcgcgacctcggcggcggtcaccttgccggagccgacggccttgtccgacaaggcctgcgacaccagctgcgaacgcgtcggcggcgcctggttggccaggtcggcgggccggttgcgctgggactggttgatgccggtgggcacaaagtacgggcacagcaccgagcagcgcacctgctccgtcaccaggcccaggtcctggtacagggtttcggtcaacgccaccaccgcgtgcttggacacgttgtacacgcccattgccggcgggttcagcaagcccgccatcgacgccgtgttgacgatatggccctggtaggccggatccttctccgccgcggccagcatcagcggcgtgaagatgcgcacgccgtgcacgacgccgtacaggttgacgcccagcacccactcccagtccttctcggagttctcccagatcaggccgcccgcgcccacgccggcgttattgaacagcaggttgacctggccgaaggcctcgatggcggcatcggccagcgcctgcacctggtcggcacgcgagacgtccgtgcgcaacccgatcaccggcacattgcgtgccttgaattccgccacggtcgcgtccagcgcgtcttcctgcacatccgccagcaccagcttcatgccgaggtcggcggcaatgtgggcaaactccttgccgaaacccgaggcgccgccggtaatgacagccaccttgttggagaagtccttcatatcgtctgtcctgtcgcgtgattcgttttgggaaacggcgggccgtgtgccatgcgcgctcaggcggcgcgctgcacctggtagccctgccgcgggaaatgcacattgagcgcgccggcgcgcgggtcctggcggcgcagcgtgacgcggcgcgcgctcagcgccagcagcacgccggccaccgggtcgcgcgcatagtcggtcggcgtgacggtgacggcgtcgccggcctgcaggccggcatccacgaccacgccctcatccagcgccagcggatcggcactgcgcgcggcgccgatcgcgtcctcgctgtcgatcacgcgcggccggccatggccgaaggtgttcatgcgcgcataccaggcctgcaagcgcggataagcctccagcagctgcgccagcgcgccggcgcggcggataaaccagaggttgtggtacagcgagaaatcggcaaccgacagcgccggcccggccacatgcccgatcccggcagcgaactgcgtttccagttggccgaacgtttcatgcagcagcgcggtggcttcgggcaacggcatgcgcagcgcattggtgtcgccacgcatggccttgcggtccgcgctgaaggcctggacctgcgccggcgacaggtggcccagcatgctggcaacgccggccggctggaacacataggtcaccgatgccgtgaacagcgccgcatcgaaccaggctgccgcgacccgcgccgccgcggcctgggccggcggatacagcgccggcgcgggcgccagcgcgtccagcacctcgcagatcagcgcggtatcgcagtagatatcggcaccgacctgcagcaccggcgtgcggcggtagccgccggtcagcgccagcaggtcaggcttgggcaggatggcggggatttccaccgcgtgccaggccagtcccttggcgcccagcagcaggcggaccttctcggagaatggcgaagttgcgtactggtgaagaatgatgtcggccatgcgatccaactccatgtttgccagcgggtgccgtgcggttcagtccagcaggtccggctgctccttgacgatgcgggcatagagcggctggaactggaaccagcccgcctgcgccgtgccgacgatcgaataggcctggcgcgcggccgcatcggagatcagcttgagcggcgcctgggtgcgcgccgcggcggcttcggccagcagctggacctggcaggagcgctccatggtgatgaaccaccaggcggcttcgtccacggtcttgccgaccgtcagcaggccatggttctgcaggatcgcggccttgttctggcccagcgcattggcgatgcgctggccttcgtcgagctccaccaccacgccgccgaaatcgtcatagaccgcatgatcctggtagaacgcgcacacgtcctgcgtgagcggatcgagcgggcggcccagcgtggaccacgcgcggccatgggtgctgtgcgaatgcgctgccgcgaccgcgtcggagcgggtctggtgcacgcgcgaatggatggcgaaggccgcggcattgaccgggtagtcgccctcgaccacgtcgccgtggtggtcgcagcggatcaggttggagaccttgacctggctgaaatggacgccgaagggattgacccagaaggtatcgggaaactccgggtcgcgcgcggtgatatggccggccacgccttcgtcgaaaccgaacctggaaaacagccggaaggccgcggccaggcgctgcttgcggtgcaggcgctctgcggcggcggtggcgaactgcggcgggcgcggcaggttgcggtagcgggccttgacctcttcgggcaggccggcgccgatctcgtcgccgctctggatttgcggggcttgcggggcattcatcggtgtctccatctttttggtgaaatccgttgcccgcggcgcgcccggcaggcgcgccgcggccctgcatgcgccggtcagaccagcttgaccagctgcttgccgaagttcttgcccttgagcaggccgataaaggcttcaggcgcgctggccaggccttcggcaatgctctcgcggaacttgagcttgccctgggcgacggcggtgcccagttccttcagcgcctgcggccagacctccatatgctcggagacgataaagccttcgatggtcaggcgcgacaccaggatcagctgcgggttcttcagcggcagcggctggccgtcatagcccgcgatcatgccgcacatggcgatgcggccgaaggcgttcatgcgcgtcagcacggcgtccaggatatcgccgccgacattctcgaaatagccgtcgatgccgtccggggtggcttccttgagcatcttgtagagctccttgggatccttggccgccttgtagtcgatgcaggcatcgaagcccagctcattgaccacgtagtcgcacttgtccttgccgccggcaaagccgaccgcgcggcagccggccagcttggccagctgcccgaccacgctgcccactgcgccggaggcagcgctgaccgcgatggtcttgcccggcttgggcaggatgatcttgttcaggccataccaggcggtcacgcccggcatgccgaccgaaccgaggtaggccgacagcgggatatgcgtggtgtcgaccggctgcaggccggtgccgtcgctgacgcccatctcctgccagccgaacatgccgaccaccttgtcgcctggcttgaacttgctgttcctgctttccaccacttcgcccacggtgccgccgatcatgacctcatcgagcggctgcggcgcggcgtaggacttgctgtcgttcatgcggccgcgcatgtacgggtccagcgacaggtagtggttgcgcaccagcacctggccgtcggcgatctgcggcacgggcacttcttccaggcggaaattggccggcgtcaccgcgccttcgggacgcgaggccaggacgatgcgcttgaacgttttggacatggtcgattcctttcagtaggaatatggaacggcttgaatactgcgtcgggaagggacagccgcgctgccccgtctgctgcatcggtgccggcgctcagccgtcggcaccggtatcggtctcacccgggcgctgcggcggcatgcgccggatgtacttgaaggtgcccgagccgcgcgccacggtcttgccgtcggcgtcgacgatctcggcttcgcagaacaccatggtggtggtgcggtgcacggtggtgccgcgcgcggtcagcgcgccgcgccccggcgccatgaagctggtcttcatctcgatggtgaccacgccccggccatccgcgtcgctgctgcggccggccaccgccatggccacgtcgagcagcgtcatgattacgccgccgtgggccatgtcccagctgttctggtggcgcttctcgatcggcagtgcgatctcgctgcggccgccttcggcgaggttgcaggtcacgccgaggtcggcgaggaagggaatgtgggtcagggggcctttgaactggttcatggcaattgcgagtccgagaattaggtgccggcgaggccgaggccttgcgccggccccaagtttgagggcaatccgggattccgccaagccgcacggtgcggcttgcccggaatgcgccctgcccggctcagaccgcgctgacgccgccgtccaccgccaggatctggccggtgatgtgtttgccggcgtcgctggcaaacagcagcgcggcgcccttcaggtcctcgtcgtcgcccaggcggtgcagcggcacgccggcgcacatggcctcaacgcccatgcgctcgagcgagcccttggtcatcttcgacgggaagaagcccggcgcgagcgcgttgacggtgatgttgtgctcgccccactcggccgccagcgtgcgcgtgaagttgaccaccgcacccttggaggtgttgtaggcaatggtctccatgctgcccggcgggttgccggccagccccgcgatcgacgccacgttgatgatgcggccgtagcggcgcgggatcatcgacagcttgccgatgcgctggctcagcaggaacaggccgcggatgttcaggttcatcaccttgtcccaggcttcgaccggatggtcttcggccggggcgccccaggtggcgccggcgttgttgaccaggatgtcgacgtggcccagcttcgcgatggcctcgtcggccaggcgcgcgatttccgactcctgcgagccgtcggcggcgatccagtcggcctcgatgccgagcgacttcaggtgcgcctgcgccgcctgcagctcgtcggccttgcgcgccgacagcaccaggcgcgcgccctgctcgcccagcgcctcggcaatctgcaggccaagcccgcgcgagccgccggtgatcagcgcggtcttgcccttcaggtcaaacagttgctggatggtacgcatattgtcttccttcgttctgtagggttcggggatgggcaagcgccgctcagaaccacgcgtcctgcatgtcgagcgtggtgcggtcgagcgactcgagcagcgccagctgcgggccgaccttgggcagctcccagcggaagaagtaggccgccgcggccagcttgccgcggtagaagtcctcgtcttccttgccgttcgcgcgcggcagcgcggcttgcgccagcagtgcctgttccagccagatccacgccaccaccacgtgcccgaaggcctccaggtagaccgaggcattggccagcgtcacgttggggtcgcccgcgctccacagcgcctgcgtgacctcggccaggcgcttggtggcggtgccgagggcgcctgcctgctgcgacaactcggcattgccggcggcgagcgcgcgggtgatggtgtcctgcacgcgctcgcccagcagcttgaaggcggcgccgtccttcatcaccaccttgcggcccagcaggtccaggccctggatgccgtgcgtgccttcgtggatcgggttgaggcggttgtcgcggtagaactgctcgacgttgtactcgcgcgtatagccgtagccgccatgcacctggatcgccaggttgttggcctccaggcaccattgcgacggccagctcttggcgatcggggtcaggatatcgagcaatagcgccaggcgcgcatgcgcggcttggtcgccggcggccgcagcggcctcttcctcgtcgaccaggcgcgcgcaatagaggttcagcgccaggccgccttcgacatagctcttctgcgccagcagcatgcggcggatatcggcgtgctcgaccagcttcacctgcgggctggccgcatccttgccgccggggccgaccgcgcggccttgcgggcggttgcgcgcgtagtccagcgcgtgcaggtagccggtatagcccagcatcaccgcgcccaggcccacgccgatgcgcgcctcgttcatcatgtggaacatgcaggccaggcccttgtgcggctcgcccaccaggtagccgatcgcgccggccttgccgcccggccggtacttcatgccttcgccgaagttgagcaggcagttggtggtgccgcggtagcccatcttgtggttcaggccggccagcaccacgtcgttgtgctcgcccagcgagccgtcttcattgaccaggtacttgggcacgatgaagagcgagatgcccttcacgcccgggatcagcttgccgtccgggccggggatcttggccagcaccaggtggacgatattttccgacagctcgtgctcgccggcagagatccacatcttgttgccgcgcagccggtactgcgcgcccagcggcgattcgccctcgtactcggcgcgcgtggtgatgtccgacagcgacgagcccgcctgcggctcggacaggcacatggtgccgaagaagcgaccgtccatctccggcttgacgaaggtctcgacctgcgccggcgtgccgtgcgtcagcagcaggttggcgttgccgatggtcaggaacgggtacgagctggtgccgacgttggcacccttgaagtaggcaaagccagccttctcgaccaccaccggcagttgcatgccgcccagttcatagtcctggccggcggccatcaagccggcctcgcagaaggccttcagcgcggtgctgacctcggggatgatgctgacggtctcgccgtcgaaatgcggctcttgctggtcgttcttcttgttgtgcggcgcgaacaggtcggtggcgattttctcgcaggtgtccagcgcggcgtcgaaagtctcgcgcgagtggtcggcatagcgcgggatgcgcgtgagctcgtcgaccttgagccattcgtacagcacgaaattcaggtcgcggcgggataggatcatcgacatggtgtctccatgcggcgcactgcgtggcgtgccgcgagttctttttgctagcgtgggaggcgccgggcgcggtcaaaaaagggcgctgccgcgcccttccctgcgtgccgctcaggcgccttcgccaaggcgcgcgatcgttccctgcgccaccgcgcagagcctctcctcgccatccctgacgacgtacacgtcgcagcgcaccaccgcctgctggcggccggcgctgacgcattcggcgcgggcgaccagcagctcgccgatcgccgggcgcacgtagttgatcttgtactcggatgtcacgaccggcaccgccatggccgcgccgcccgcgtaggtcagcgcattgtcggccaggtagctgaccacgccgccgtgcaggaagccgtgctgctgccgcaggtcctgacggatcggcaggcgcaactcagccttgcccggcgacaacgccgccagttcggtgccgaccaggaccgagaagggctggctggccagcacctcccggccccaggcgagcatgtcggcgggcgtggcccgcgcggtgcccgcagccgacatcagagcacttcgaacaggccggccgcgccctggccgccgccgatgcacatggtcaccaccacgtacttgacgccgcggcgcttgccttcgatcagcgcatggccgaccaggcgcgcgcccgacacaccgtaggggtggcccacggcgatggcgccgccgttgacgttcagccggtccatcgggatgccgagcgtgtcggcgcagtacagcacctgcacggcgaaggcttcgttcagctcccacaggccgatgtcgtcgaccttcaggccggccttcttcagcagcttgggcacagcaaagaccgggccgatacccatctcgtccggctcgcagccagccacggcaaagccgcggaacacgcccagcggctgcaggccgcgggcctcggcgacgcgcgcattcatcaccaccgctgccgaagcgccgtccgagaactgcgaggcattgccggcggtgatcacgccacccggcaccgcgctgcggatcttggagacgccttccagcgtggtatcggcgcggatgccctcgtcggcggagacggtgacttccttggtcaccagctggccggtcgacttgtcggccacgcccgccagcaccgtcatcggcacgatctcgtccttgaacttgccggcttcctgcccggcggcggcgcgttgctggctgcgcacgccgtactcgtcctggcgctccttcgagatgttgtagcgcttggccacgttctcggcggtctgcagcatgttccagtagatttccggcttgttcttcagcagccagctttcctggaccatatggcggttcatctcctgctgcacgcacgagatgctttccacgccgccggcgacgaagatgtcgccctcatcagcgatcacgcgctgcgcggccatggcgatggtctgcaggccggacgagcagaagcggttgacggtggcgccgggcacggtcaccgggcagccggcgcgcagtgcgatctggcgtgcgatgttggcgccggtggcaccttccgggttggcgcagcccatcagcacgtcttccacttcggcggcctcgatcttggcgcgggcaatggcgtgctggacggcatgaccgccgagcgtggcgccgtgggtcatgttgaaggcgcccttccagctcttggccagcggggtccgcgcggtggatacgatgactgcttcgttcatgtcttgctcctcggattctcttgtgtcgttcagttcggtggttcggttcagccctggcccttgagcagttcagcggacgtgacgcgcgcaacgccggcggcgccgaggtcctgccatgctttggccagcgacccttccaggtcgatggcgcggcaggcatcctcgatcaccgcggccgcgaagcccgcggcgcgtgcatcgagcgcgctccaggccacgcagtagtccgtcgccagacccgcgcagaacacgcgcctgacgccatgctcgcgcaggtagccggccagcccggtgcgcgtggtgcggtccgcctccaggaaggcggagtagctgtccacgtcggcatggtggcccttgcggatcaccagccgcgcatgcggcacgtgcaagcccgcatgcagcgcagcgccgggcgtgccctgcacgcagtgcaccggccacagcacctgctcgccatacggcagcgccagcgtctggaacggctgcgtgcccgcatggttggccgcgaacgagacgtggctgacgggatgccagtcctgcgtcagcaccacatgaccgaacgcacgcgccagccggttgatgacgggcaccacttcatcgccgtggggcacggcaagcgcgccgcccggcatgaagtcgttctgcacgtcgatcaccagcaggcaatcgtccggtccgatggtggtgttcatctcagctccaggctgaaccatgtggcggtattaaccgttgaagcccttgccttcgtccgccagcttctgcagcagcggcgcgacctgccacgcttcaccgtggtagcccttggcgtagcgcttcatcgacagcgccacgttgtacaggccgacctggtccgcgtacagcatcgggccgccgcggaacagcgggaagccgtagccggtcaggtacaccatgtcgatatccgaggccttggaagcaatgccttcctccaggatcctggcgccttcgttgaccagcgcgaacaccaggcgctcgacgatctcttcgtcagagatcttgcggcgcgtgatgcccaggtccttcgagtgctgcacgatcatgtcgttgacctgctggttcgggtacggcttgcggtcgcccgccttgtagtcgtaccagcccgcgccggtcttctggccgaagcggcccatctcgcacagcaggtccgcggtcttggaatactggatctccggcttgtccaccgcgcggcgcttgcggatggcccagccgatgtcgttgccggccaggtcgcccatgcggaacgggcccatggcaaagccgaacttctcgatggccttgtcgacctgctccggcagcgcgccttcgtccagcaggtagccagcctggcggctgtactgctcgatcatgcggttgccgataaagccgtcgcaaacgcccgacaccaccgcggtcttcttgatcttcttgccgacctgcatgaccgtggccagcacgtccttgccggtcttctcgccgcgcaccacttccagcagcttcatcacattggccgggctgaagaaatgcatgccgaccacgtcctgcggacgcttggtgaacgaggcgatcttgttgacgtccagcgtggaggtgttcgaggccaggatcgcgccttgcttggcgacttcatccagcttcttgaacacggtctccttgacgcccatctcttcgaacacggcctcgatgatcaggtcggcgtccttgaggtcgtcataggacagcgtggtgctgagcaggcccatgcgctgctcgaccttctcttgcgtgagcttgcccttcttggcgctgttctcgtagttcttgcggatgatgccgacgccgcggtcgagcgcttcctgcttggtttccaggatggtgaccgggatgcccgcgttgaggaagttcatgctgatgccgccgcccatggtgccggcgccgatcacggcgaccttctcgatcttgcgggtcggcgtgccttcgggcacattggggatcttgctggcggcacgctcgccaaagaaggcgtggcgcagcgcgcgcgattccggcgtggtaaccaggtagaggaagccctcgcgctcttgcttcaggccctgttcgaacggcttgagcgagccggccaccgcttccaggcacttcagcggcgccgggaagttcttggccatcgcggccacggtattgcgggcaaagcccaggtagccttcggggttctcgtggcgcaccttcaggtcgcgcaccttcggatgcgggccggtggcggcgccaacgttctgcgcgaacttgaccgcggcgggcagcacgtcgccgtcgacgatttcatcgaacagcttggtgccggcaaacttctcggacagcaccggggtgcccgacacgatcatgttggccgcggcctccaggccgatcacgcgcggcaggcgctgcgtgccgccggcgcccggcagcaggcccagcttcacttccggcagcgcgatctgggcgcccttggacgccacgcggtagttgcagcccagcgccagctccaggccgccacccatggcgaccgagtgcacggcggccacgaccggcttggacgagccttccagcacgcggatcaccgagtgcagcgtcggctcctgcatggccttgggcgtattgaattcacggatgtcggcgccgcccgagaaagccttgccagcgccggtgatgacgatggccttgacggcggcatcgtccagcgcacgggtcatgccttcgacgatgccaagccgggtgctgtgacccaggccgttgacagggggattgtcgagcgtgatgacggctacgccgtcctgaacctgatactgcgctgtcatgctggttcctttggtgtcaaaagttgtctcgggattcgaattctcgaattcaatttttactgcacggcgcggccggcagcggccggcgactgctgcgggaggctgccgtcatgagcgggtaaaccctccgcccgacctgccgctttcccgcgtcccgcaacgccttccggcgcctgggcgaaacaagcatacacaaaatagcacggtcgttcaattttaattttcggacttttccggcgacatgcgcggcgctaatgccgcccctgaccgcgatgcatggcggggcgcctgacgcggtgccaaatcgtcccgccatggcggataaagcacttgccgagtgcgactgagtgccgcctctaaaccagtatcggactttatttggccgacacggacaaatcgcgcgggccgaccctgtaaactcgcggcttttcgttttttgccgtccgggttccacaagatgccggatcggcggaaggtccagcgaccctgatgtcttccccctcacattcccacgcccacgagcaccagcacccggtggtcgagcacgaccacctcaagcgcaggctcaaggcccgccacctgagcatgattgccatcggcggcgcggtcggcaccgggctgttcgtggcctcgggcgcctcgatcgcgcaggccggccccggcggcgcgctgctgatgtatatgctgctcgggctgatggtctattgcctgatgaccagcctgggcgagctggcggtgcatatgccggtggccggctccttcgtcacctacagcgcgctctatgtcgacgaaggcttcggcttcgcgctgggctggaactactggttcagcctggcggtgaccatcgccgtggaactgaccgcggcgcagctggtgatgcagtactggttccccgaaatgcccggcgtggtctggagcgccgcgttcctgctgctgatgttcgggctcaatgcgttctcggtgcgcggcttcggcgaggccgagtactggttcgcgctgatcaaggtggtgaccgtgatcgtgttcctgggcgtgggcctgctgatgatcttcggcatcatgaaaggcggcccgcagtctggctggcacaacttcaccatgggtgacgcgccctttgtcggcggcatcccggccatgatcggcgtggcgatgatcgcgggcttctccttccagggcacggaaacggtgggcgtggccgccggcgaagcggagaacccggccaggaccatcccgcgcgcgatccggcagaccttctggcgcatcctgctgttctatgtggtcgcgatcctgatcatcggggtgctgattccctataccgatcccagcctgctgcgcaacgacgtcaccgacgtgggcgtgagtccgtttgcactggtgttccgccacgccggcctggcctttgctgcggggctgatgaacgcggtggtgctgaccgcgctgctctcggccggcagctccagcatgtatgtatcgacccggatcctctacggcctcgccgtcagcggccgcgcgccgcgcgcgttcggcaagctgaccgtgagcggcgtgccgttcaatgcgctgctggccaccaccgccgtgggcgcgctgtgtttcttcagttcgctgttcggggacaaggcggtctacctgtggctgctcaacacctcggccatgaccggcttctttgcctggctgggcattgccatcagccattaccgcttccgtcgcgggctggtgcaccagggctatgacgttggcatgctggcctaccgctcgccgctctatcccttcggccccatttttaccgtggtgctgtgcgtggtgatcgtggccgggcagaactaccaggcgtttgcggatattccgaaccggtggccggagatcgtggcgacctatatcggcgtgccggcgttcctggcgctgtggtgggggtaccgggcggtgaagaagtcgcggctgatcgactatgaggatatgccgtttgacttgccaaagccggcagttttcggccctctcccgcaagcgggagagggagcacacagttggcaaggggagcgcacagtggccgaagtcatacctccagccactccttcctgatctgcgagttggccttcagttccgcgggcgtcccctcgaacacaatatgcccgtgccccatcacgtagacgcgctgggaaatatccagcgcgatcgccagcttctgctcgatcagcagcacggaaataccccgctccttcagcgtcttcaggtagtccccgaccagggccacgatcatcggcgccaggccttcggtcggttcgtcgatcagcaccaggtcggggtcgcccatcagcgtgcggcacaacgtcagcatctgctgctcgccgccggagagcacgccggccgaggtgttctcgcgctccttcagccgcgggaacatgttgaacatgtcctcgacggtccagcgcggcctggcctgccgtgggttgcgcttctcgcccagcagcaagttctgccgcacggtcagcgtcggaaagatatcccggttctccggcacatagccgatcccgaggtgcgcgatctcgaaggtgcgccgccccaggatctcttcgtcgcgaaaccgcaccgagccctcggccttgaccatgccgaggatggccttggccatggtcgagcgccccaccccgttgcggcccagcagcgcgacgatctcgccttcgtcgatatgcgcgtccacgccgtggaggatatggctcttgccgtagtaggcgtgcaggccctggacgttcagcatgcgcttgcccatcagtgcgctccttcggtggcttcctcgtcgagggttgtgcccaggtaggcttccttgaccttgcggttgttgcggatggcctgcggggtgtccgtggcgatcacttcgccgtagaccagcacagagatgcggtcggccaggccgaataccacgctcatgtcgtgctccaccatcaccagcgtcttgccgacggtgaccttgcggatcagctccaccgcgtgatcggactcggagcggctcatgcccgcggtgggctcgtccagcaggatcacctcggcgccgccggcgatggtgatgccgatctccagcgcacgctgctcggcataggtcagcaggcccgcctggctgtcgcggcggtgctgcatgccgatcagctccagcacctcctccgcgcgctcgcgcgtgtcgcgcaggcccttgagccggtgccagaacgaatacttgtagccgagcgaccacagcaccgcgcagcgcaggttctcgaacaccgacagccgatggaagatgttggtgatctggaagctgcgcgacagccccatgcggttgatcacgaacggctgcagcccgccgatctccgcgccattgagccgcacggtcccgctgctcggcgcaaaccggccggaaatcaggttgaaggtcgtcgacttccctgcgccattgggcccgatcagcgcatggcgctcgcccttcgggatgctcaggttcacgccgcggatgatttccgtctggccgaacttcttgcgtacatcggtcagttccagtgccgctgtcatggcctgcctcctgcgatttccatctgtaccttgtcccacgcgctgcgcacccgcgccgccgccagccgccacgcgaacaggccagccgcccacagcgcggccgccgccagccatggcgtccaggttgcggcatcgaagccgacgccgaacagcgacatcgtggtgccgttggcgctgtcgacctgcaccttgtagaccagctcgaccgtcaggatcatggccagcagcagcaccacggcggcgccgccggcacgcgcgtaggacggcagcatgcggcccagcttgcccttgcccagcagcggcacctgcatcagcagcaggctggccagcccgcccggcacgaacatcaccatcagcacgaagaacaggcccaggtacagcagccaggccttggtcaggtccgacagcgccaccgcgaacagcacgaacaccaccgcgccgatgatgggcccgaagaacacgcccgcgccaccgatgaacaccgccagcagcacgccgccggagcgcaccgcgctgacgttctcggccgagacgatctcgaagttgatggcgcccagcgccccggcgataccggcgaagaatgccgacaggatcagcaccaggtagcgcacgcgctgggtgttgtagccgatgaactcgacccgctcggggttgtcgcgcacggcgttggcgatgcggcccagcggcgtctgcgtccaggcgtacatcgccaccatcgacagcaggcaccacgccgcgatcaggtagtagacctggcgcccgggcccgaaggtgatgcccaggaacggatcgccgaccacgcggttggtggagatgccaccctcgccgccgaagaactccggaaacatcagcgagctggcgaacaccatctcgccgatgcccatggtgatcatggcaaaggtggtgccggacttcttggtggtgacgtagccgaagatcacgccgaagaaggcgccggccaggccgcccaccagcggcagcatcgacaccggcagccagaccttgcccgccccgaccatgttcagcacatgcacggcgataaacgcgcccaggccggagtagaccgcgtggccgaacgacagcatgccggtctgcccgagcagcatgttgtacgacagcgcaaaaatgatcatgatgcccatctgcgacatcagcgtgatggcgaagcccccggtgaagatcagcggcagcaccagcatgaccagcacggtcaggctccagatgatccagcgcgccaggttcagcgggcggtagcgcagggtgcggccggtcaccaccggctcgcggggttgttgcatcgcttgctccatggtgtcagctctcccgggttcccatcagtccacgcgggcggaagatcagcatcaccaccagcagcaggtacggcagcaccggcgccacctgggcgaccgtgagcttccacaaggaatagaacggcgtggcctcgctgaccgccagccccaggctggtcatcaggcccgccagcgaggcgtcgatggtgaccgcgaaggtctgcagcacgccgatcaggatcgacgcaatgaaggcgcccaccagcgatcccatgccgcccaccaccgccaccacgaacacgatcgacccgaccgccgcggccatcgatggctcggtgacaaaggcattgccgccgatcactcccgccagcccggccagcgcggcgccgccgccaaacaccatcatgaacacgcgcggcacgttgtggcccagcgcctcgaccatttccgggtgcgtcagcgcggcctggatcaccagcccgatgcgggtacgcgtcagcaccaggtagatcgccaccagcatgcccagcgacaccagcatcatgaaggcgcggtacttggggaaggacgaggtgaacaccgtgaacagcggcccgtccagctccgcggggatccggtacggcaccgccgccaggccccacaccagcttgacgccctcttccatcaggtaggccaggccgaaggtgaacagcagctcggccacgtggccgtacttgtgcaccgtgcgcaggccgaagcgctccaccagcgcgcccgcgccggccaccagcagcggcgcgaagatcagcgccggccagaacccgaccttgctggcgatggtgtaggcgaagtaggcgcccagcatgtagaagctggcatgggcaaagttgagcacgcccatcatgctgaagatcagcgtaaggcccgatgacagcatgaacagcagcagcccgtagctgatgccgttcagcagtgagatgacgaagaattccacagcgtgtccttcaagctggcgccgccatgcgtgggcatgccggcgtccgtccggttggattgagggtgagcgtccccctccgggggcggttacccgccccggacgctccccggtatcgaccgaaaaagactgaaagtatgcaggatcgggcggccactttgtcagcgtggccggcccgtcacggacaggatcagccgggccgcttcatctggcaggaggtcggctgggccgacacgtactggtccatcagcgcgttggtcttccagccgtagccggtgttttcctggtcgtacttgatttccttgccatccaccttggtccaggtggcgaccaccagcggctgctgcgcctggtggtccgagttgcgcatctcgaccgtgccgttcatgctgtcgaccttgatgccctcgagcgccttggcaaccttgatcggatcggtcgagccggtgtccttgaaggccttggacagcatggcaatgccggtgtaggaggccatcacgtagaagtcgtcgttgtacttcttcttgaagccctcgatgacatcagcccccttgaaccccttgttgttggggttgtagtagccgacatacttgacgtgctcggcaccggtggcgcccatcgccgtgggcacgccggtggtgccggcgtagtaggtgtagtagttggtggtcaggccggcatccttgcccgccttgatcagcagcgccaggtcgctgccccagttgccggtgatcacggtatcggcgccggaggccttgatcttggccgcgtacggggcaaagtccttgacctgggccagcgggtgcaggtcttcaccgacgatctggatgtccgggcgcttgcgcttcaggtagtccttggcggcgcgcgccacctggtggccgaacgagtagttctggttgatcaggtagaccttcttgacgttcgggtccttggccaggaaggtggtcagcgcctccatcttcatgtccgagttggcgtcgagccggaaatgccagaagttgcatttggaattggtcatgtccgggtccaccgcggcgtagttcaggtagacgatttccttgcccggattgcgctcgttgtgcttggccaccgcgtcctgcagcgccagcccgaccgacgagccgttgccctgcacgatatagcggatgccctggtcgaccgcctgcttgaggatggtcaggctttcctgcggcgacagcttgttgtcgaaacccaccacctcgaacttgtgcgcgccggcccagttcttctggttggcgatgtcggcgacatactgccagctcttgagctggttctgcccaacgggagccatcagccccgatagcgggtcaatgaaggcaatcttcaccgtatccgcgagtgcggtacctgaaaccagcgcagaacccagtgcggcaaacacggccacaccggccaccagcggacgcattttggtcatacctgtctccttcactcttgtcgttggcttgtcgtcgaatttggctggctgcgcggcgtcctccatgccacgccttgcagccgccccgaacacgccatgccgcaagcaggcatggcgcaccggaaagcgcgtgccggcgtcaggcagtcggcagcttgtagtccttgaactgctcgcgcagcttgagcttctgcatcttgccggtggcggtcagcgggatctcggtgacaaaggccacgtcgtccgggatccaccacttggcgaccttgccatcgaagaactgcagcagttcttcgcgggtgacttcggcgccgggcttcttcaccaccaccagcagcgggcgttcatcccacttggggtggtaggccgagatgcaggccgccatatgcaccgcggggtgcgcggcggcgacgttctcgatatcgatcgacgagatccattcgccgccggacttgatcacatccttgctgcggtcggtgatctgcatgaagccatcggcgtcgatggtggccacgtcgccggtcgggaaccagccgtcggccagggggctgatgccattgcggtaatactgctcgatgacccatgggccgcgcaccatcaggtcgccgaaggccttgccgtcccacggcagctccttgccttcgccgtcgacaatcttcatgtccacaccgaagatcacgcggccctgcttttcctggattttgtggcgatccgcgtcagagagagcttcgtgcctggctagcagcttgcacgccgtgccaagtggtgacatctcggtcatgccccaggcatggatcacttcgacgttcagcgcctcgaacgcacgggtcatcgcgggcggcacagccgagccgccgatcacggtgcgacggaagctggagaatttcagcttgttcgactgcacgtgctggagcaggccgagccacaccgtcggcacgccggcggagaaggtcaccttctcctgctcgaacagttcatagatcgacgccccgtccagcttggcaccgggcagcaccagcttggcgccgaccagcggcaccgagtacggcaggccccaggcattgacgtggaacatcggcaccacgggcaggatcacgtcgctggcggagcagcccagcgcgtcgggcagtgccgacgcgtacgagtgcagcaccgtcgagcggtgcgagtacagcgcgcccttggggttgccggtggtgcccgaggtgtagcacaggctcgacgccagattctcgtcgaactgcggccattcgtagtcgccgtcctgcgcgtcgaccagctcctcgtagcacagcagcggcaccttggattcggccggcatatgcgcgcggtcggtcatcgccacccagcccctgacgttggggcaatgcggcgccacgccttccaccagcggcaggaaggtcaggtcgaagaagacatagccgtcctccgcatggttgacgatataggcaatctgctcgggaaacaggcgcgggttgatggtatggcagacggcgcccatgccggacacgccgtagtagatctcgaggtggcggtagccgttccaggccagcgtgccgacgcgctcgccctgcttcacgcccagtgcgccgagcgcctgcgccagcttgcgggcgcgcagttcgcaatcgcggtacgtgtagcgatgcaggtcgccctccgtgcgccgcgagacgatctcggtgctgccgtaataacgcgcggcgtgtttgatgatggaggaaatgagcagcggcgcgctcatcatttgacccatcaatgccatgaacctgcctcctgaaagtcttgtgtgattcgcctgaaaacgaacaaccgtactattttttgtcggtcgtttccatgcaccaaatcggcgtccggccgatctcgttgtgcactgccgtactgttgttgtgtattgccgtcggggttgccgccggcattgccatcgaattcggggccgcaattctgcgaaaagcccatgcaccggattcatgtgcgcactgaaggaggaaaataaccgtgcggtgcatggcggcattaactcggtcgagcggtcgagtgccgttgaggacgtacaatactgcgtggcatgttgcacctcaacatgtcgttttccctagccaccaccgcattttcgtgcccccggcatgccgcgccgcaccgccttttacgcggttcgccgcacatggacgagcgcacggaattcgcaccgccccttgcgccccgaggcgcccctacgcgatgccagacacgccccagtcacaagctccgcagccctccgacgcagccacgccggcaacgctgtccgcgccctggcgcaccgcgcccggctttgccgaactcggcgcgcagttcttcacgcggctgcgcccgacgccgctgccagcgccctacctggtgggggtggcgccggccgctgcggccctgctcggctgggatgccggcatcggcagccagcaggacttcatcgagacctttatcggcaaccaggtgccggactgggccgacccgctcgccacggtctattccgggcaccagttcggggtctgggctggccagctcggcgacggccgcgccatccgcctggcgcaggccgagaccgccaccggcccgtgggaaatccagctcaagggcgcgggcctgacgccctactcgcgcatggccgatggccgcgcggtgctgcgctcgtcgatccgcgagtacctctgctccgaagccatggccgcactgggcgtgccgaccacgcgcgcgctgtctatcatgggctcggacgcgccggtgcggcgcgagaccatcgaaacctccgcggtggtgaccaggctgtcgccgacctttatccgcttcgggcacttcgagcatttcgccgcgcacgacgacgtcgccgcgctgcgcaagctggcggatttcgtcatcgacaacttcatgcccgcgtgccgcgacaacgcccagccctaccaggcgctgctgcgcgaggtctcgctgcgcaccgccgacctgatcgcgcactggcaggcggtgggcttctgccacggcgtgatgaacaccgacaatatgtcgatcctgggcctgaccatcgactacggcccatttggcttcctcgacgcgttcgacgccaaccatatctgcaaccactccgacacgcagggccgctacgcctacagccagcagccgcaggtggcattctggaacctgcactgcctggcgcaggcgctgctgccgctgtggctgccgccagaggatgccgaccaggaaggcgcgcgcgacgctgccgtggcagccgcgcgcgcggcgcttgacccgttccgcgaccgctatgccgcggcattcttccgccactaccgcgccaagctgggcctgcgcccgcccgccggcggcgatgacaagagcgatgagccgctgctgaccagcctgttccagctgctgcacggccagcgcgtggactacacgctgttctggcgcaagctgtgcggcatttcgtccaccgatgcctcgcgcgacgcgccggtgcgcgacctgttcctggaccgcgccgccttcgacgcatgggtggccgactatcgcgtgcgcctgcgcgccgagcagtcgcacgatgccgcgcgcgaactggaaatgctggcagtcaaccccaagtacgtgctgcgcaaccacctggccgaaaccgcgatccggcacgcacgcgagaaggacttcaccgaagtggaccgcctgctggcagtgctgtcgcgccccttcgacgagcagccggaagcagagcactacgcggcgctgccgccggactgggcctccggcctggaagtcagttgctcgtcgtgacgtcatgtgatccgtgccctgcacgccggcgcctgccggtgtaaggttcgcgcagttcgcacgaccaatgccttaactgaggaacccatccgaggaagccctgcgaggacaagaccatgaccaccaccaagaccgacgccgagtggcgtgaacaactctccgacatcgaataccgcgtgacccgcgaggccgccaccgagcgcccgttcaccggccgctactgggaccactgggacaacggcatctaccactgcgtgggctgcggcacgccgctgttcgaatccgccaccaagttcgatgccggctgcggctggcccagctatttccgcgccatcaacggcgaggtgattgccgagcacgtcgaccacagccacggcatgacgcgggtggaggtacgctgcaaggaatgcggcagccatctcggccatgtcttcgaggatggccccgccccgaccggcctgcgctattgcatcaactcggctgcgctaaaattcgatgatcgcgacccggcacagcgtgcggcggatgatgcccacgccgccggcagcgacgacaacccccggcgcgacccgcagcgctgaatgctccggcaagcacgccggacacaacctggtaccgcatgaaattcctgttcgacctgttcccggtcatcctgttttttgccgccttcaagctggctgatatctacaccgccaccgccgtggccattggcgccaccgtgctgcagatcggctgggtctggttccgccaccgcaaggtcgagccgatgcagtgggtcagcctgctgatcatcgcggtgttcggcggtgccacgctggtgctgcacaacgagaccttcatcaagtggaagccgaccgtgctctactggatgttcgcggtggggctgctgggctcggtgatcggctggcgcaagaacctgatccgcgccatgatggaaaaacaggtgaccctgcccgacccggtgtgggcgcgcctgaacgccgcctgggccggcttctttgccgccatgggcgtgctgaacctgtacgtggcctaccagttctcgaccgaggcctgggtcaacttcaagttgttcggcagcatggggctgatgctggtgttcatcgtcgcccagagtgtctggctgtcgcgccacatgcccgagaacagccaggactgacggccccgcccccgcccccccgaatcgaaggaaaccattgatggcagccgatcccgccactatcgaggcgatgctgcgcgaagcgctcgcccccagccacctggccgtgcgcgacgacagcgcgctgcacgccggacatgccggcgccgcatccggcggcggacattacgacgtgacaatcgtcagcgagcgctttacgggtcacagccgggttgcgcgacaccgcatggtgtatgatgcgctgcgcggtctgttccccgcgcagatccacgcacttgccgtgactgcgttcaccgaccaagagtaccaatcccgcgcatcatcacgcgattcttccagcaactctcagacctgattccatgaagaccaccgtcctctcgttcagcctggcggctgtgcttgctgccggcagcctgccggccatcgcccagaatgccgccgtcgtgaatggcaaggccatttcatcggcaaagctggacaagttgatcgccggcaccggccagcccgacaacccggagctgcgctcgcgcgcgcgcaacatgctgatcgaccgcgaactgctcgtgcaggaagccaacaagcgcggcctgacccagcgcgacgacgtgcaggaacaactggaacaggcccgcctgaacgtgctggccggcgcagtgttcgaagactacgttaagacccacggcgccagcgacgccgagctgcgcaagcagtacgacaagatcaagttgcagttcggcaacggcaaggaataccacgcccgccatatcctggtggaaaaggaagccgacgccaaggcgatcatcgccaagatcaagggcggcgccaagttcgaggacatggccaaggcctcgtccaaggacccgggctcggccgccaacggcggcgacctggactgggccaacagcagcagctacgtccctgagttctcggctgccatgaccggcctgaaaaagggccagctgaccgataccccggtcaagacccagttcggctggcatatcatcgaactggtcgacgtgcgcgacgccaagatcccgtcgttcgaagaggtcaaaccgcagctcacgcagatgctgatgggggaccagaactggcagcgcgagcagttccaggccatgatgaagtcactcaaggacaaggccaagatccagtaaggcacggtccggtcgcccccgccggtcctgcaagattcaaggatgcagcgcgtggagtcgactggccgctactggcaactctggcatctctcgtcccggggcatgtgctattgcgcactggcctgggcgaccctggacggcgccgcccccggctggcgccagctccacccctatctcccgttgcgtgaccgttacgcgcccgagaagatcctgcacgccgtggtggcttacaaggaggctcgcggcgagatcagggcgccccctggttttgaagccgggcggatgctgacttatgcctatgcgtcgtggagttcacgcctgctccctccgcttgccggctgaaacctgccttcaccggcgcaggtcgtagcgccacccggtttcgtcgagctgcctgatactgtcggcaaccagtccgaccagcgcgtccagcatcttgctgcccttttcccgatggcgctgtctatgccgccagcggcaaactggcctccagttcggccgtggaaacctcgttcagcaagactttcttcatgatgcgttctccgccagcggctgcactttcacgttcaggaccggatgcaacagcaggtacaccagcaccgtggccagcagcgccaccagcccgttgggccactcgggcagccagcggttcagctcgaggccgagccccagtgccatgccgaccagcgcggcgccgatgccggcccggttgaatgcgggctgccggtcgagttcgcgaacgtcatagcggcctttgtgccggatatagaaatccgccagcagcgggccggccagcggcggcgccatgatgccgaggtaattgatgagctgcgcgttcatgcccctggcgccgtaggcatagcggcacaacaacgccaggctcaggccggtgcgttgggcgatgatgccgagcagggctgtcagcacgaacaggatgcccatgcccatgccgatggcgatggcgatggccagcaacgccatggagaaagaaacgcccgctccgcccgcgggcccggccagggtgccgccgataaacaggccggtggcaacatagccaaacccgacccataccatcacctgcttccaggttggcctgcgcgcaccgggcgggaccgtggcgaacatatagtctgcatcgactgccggggacgactgcgccttctgattcatggtgggatctccgaatcagccgttccgggttcgagcgacccggatgcaagcggaccagccctgcatccgatcatgagtcagcgcgagagtaacagtgcgaaagcggcaggaaatgcggaagattccaagatgcggagcgaaatggccgtcgccatttgggctttggccgaaaaactaaaaagccaccggcgctgccggtggctcttgcttgggacgaagggcgcaagccctgggctgctgcttaccccacccacttccgcgcattgcggaacatccgcatccacgggctgccgccatcggcaacctgcttccacgcgtccggggcccagctcatggtcgcggcacggaacacacgctccgggtgcggcatcagcacggtgaagcggccatcgacggtggtcaccgaggtgatgccgtcgggcgagccgttcgggttgagcggataggtctgcgtgaccgagccgtagttgtcgacaaagcgcagcgccacgtgggcctggtcgatattgccctgctgcgagaagtcggcaaacccttcgccgtgggcaaccacgatcggaatgcggctgccttccatgccggcgaagaagatcgacggcgacgactgcacctcgaccgtgacaaagcgcgcctcgtactgctccgactggttgcgcgtgaacttcggccaggcgcctgcgcccgggatgatcggggccaggttgctcatcatctggcagccgttgcaaacgcccagcgcaaaagtgtcctggcggttgaagaaggcagcgaactgctcggccatctgcgcgttgaacaggatggtcttggcccagccctcgcccgcgcccagcacgtcgccgtagctgaagccgccgcacgcgacaaagccgctgaagtcggccagattggcgcggcctgcgatcaggtcgctcatgtgcacgtcgtgcgtatcgaagccggcgcgatccatgctgtacgccatctcgatctgcgagttgacgccctgctcgcgcaggatcgccacgcgcgggcgggcgccggtggcgatgaacggcgcggcgatgtcttcggccgcatcgaaggtcagcaccgggctgatgccggggtcggcggcgtcgagcaggcggtcgtattcgctgtcggcgcaggccgggttgtcgcgcaggcgcgcgatgcgccagctgacttcgctccagttgcgctgcaggtcggtgcgcgaggcgccgaagaccttcttggcatcgcgatagacctcgatctggtcggtcgcgttgggcttgcccaccacatggctgcaggccgacaggccggcttcgcgcagcacggcaaagaccgtgtcgcggtcttccatgcgcacctgcaccaccgcgccgagctcttccgagaacagcgcgcgcaaggtctggttgttgcggcgctcggcgatctgctgcgcccagttcttggcgtcgccgtagtcctgctcctgctgcgggtccagcgccagcatgtcgacgttgagcgagatgccgcagtggccggcaaaggccatttccgccagcgcggccatgaagccgccatccgagcggtcgtgataggccagcagcttgccttcgcggttcaggcgctggatcacgttgaagaagttcttcaggtcttcggcgttatcgacgtcgggggcgctgtcgccgacctgctgcgtcacctgcgccaggatgctgccggccatgcggttcttgccacggcccaggtcgacggcgatcagcacggtgtcgccggcgtcggtgcgcagttgcggggtcagcgtgcgattgacgtcgtccaccgcggcaaaggccgagatgatcagcgacaccggcgcgaccacttccttgttgacgccgtcgtcctgccacttggtgcgcatcgacagcgaatccttgcccaccgggatgctgatgccaagcgccgggcacagttccatgccgacggcgtgcacggtgtcatacagcttcgcgtcttcgccttccacgccgcaggccgccatccagttggccgacagcttgaccttgcccaggtccttgaccggcgcggcggccaggttggtcagcgcctcgccgatcgccatgcggccggaggccggcgcattgatcacggccagcggggtgcgctcacccatggtcatcgcttcgccggccttgccctggtagtcgagcgtggtcacggccacgtcggcaaccggcacctgccacgggccgaccatctggtcgcgcgcgttcatgccgccgacggtacggtcgccgatcgaaatcaggaacgacttgctggccacggtcggatggcgcagcacgtcgcgcacggcctgctccagactgatgccggtcacgtccaccgccggcagttcctgctcgacgcgcttgacgtcgcgatgcatgcgcggcggcttgcccagcagcacgtccatcggcatgtcgacggcgtagtgctccttgagcgcggcgtcgacgctggcgtcgaccagttgcagctgcttttcttccgtggcaatgccaaccaccgcgaacggcgagcgctcgcgctggcacatggcctggaattgcgggaagctgtccggcgcgatcgccagcacatagcgttcctgcgactcgttgcaccagatctcggccggcgacaggccggactcttccaggtgcacctggcgcaggtcgaagcgtgccccgcggtcggcgccgtccaccagttcggggaaggcgttggagatgccgcccgcgccgacgtcatggatcgacaggatcgggttggcgtcgccgagctgccagcaggcgttgatcacttcctgcgcgcggcgctccatctcggggttgccgcgctggaccgaatcgaagtccagatcggcggtgttggtgccggtcgccatcgagctggcggcgccgccgcccatgccgatgcgcatgcccgggccgcccagctggatcagcagcgtgccggccggcagcgggttcttgtgcgtgtgcgcggcgtcgatattgccgatcccgcccgcgatcatgatcggcttgtggtagccgcgcacggtgccgccgacgttctgctcgtagacgcggaaatagccgcccaggttggcacggccgaattcgttgttgaaggcggcgccgccgagcgggccgtcgatcatgatctgcagcggcgaggcgatgcggtccggcttgccggtcacgccgggcttgtcttccgggttgcggtgcgccaccggctgggcggcgtcgcggtcgttttcccaggactcgacggcctcgggcagcatcaggttggacaccgtgaagccggtcaggccggccttgggcttggcgccgcggccggtcgcgccctcgtcgcggatttcaccgccggcgccggtggaggcacccgggaacggcgagatcgcggtcgggtggttgtgcgtctccaccttcatcagcgtgtgggtcagcgcctcgtggcggccgtacttgtggtcatcgccgcgcgggaaccagcgctcggccacgtccccttccatcaccgccgagttgtccgagtaggccacgatcgagccttgcggattgagctggtgcgtattgcggatcatcgcgaacagcgacttgtcctgctgcacgccgtcgatggtccaggtggcgttgaagatcttgtggcggcagtgctcgctgttggcctgcgcgaacatcatcagctcgacgtcggtcgggttgcgctccagcttgccgtaggcatcgaccaggtagtcgatctcgtcctcggacagcgccaggcccatctcgacgttggccgcggccagcgcgctgcgtccggccgagatgtcgataaagcgcagcggcttggccggcagttcctggaacaggccggcggcatcgtcacgcgaggcgaccacggtctcggtcatgcggtcgaacaggtgcgcggcgacggcggcgcgggtatccgcgtccagcgtcttgcggccgcgcagcaggcccttcttgcagatgaccgtgatttcgataccgcgctcgatgcggtggatatgcgtgaggccgcagttatgggcgatgtcggtggccttgctggcccacggcgagatcgtgccgaagcgcgggatcaccacgaagcggtcgccgtcgggctgatcggcgaacggtgcgccgtaggtcagcagcgccgccacgcgggactgctcttcggccgacagcggcgtctgtgcgtcgacaaagtgcaggaactggccatgcaccgattcaatatcggcgtcgatctgccgcagggcggtgagcaggcgttgctgacggaaggcggaaagcgccaaagcgccggggaagcacgagaaatgcgccatgatcgtagcggtcgggaggcggtgaggtaggggctgctgcttagccggcaccgctgcatggggtgccgactggcgggaaaccgctattgtaccttgccggcacccggattttgcactgcgacatcacgacggggccgtgttaccgcccatcctgataatgcttatgcgtcacttttaccgaatggacggctcagagtgacgtcgccgagcgcgcggcctgctcgtacaggccggtcagcacccgcatcagccgggcgagctccccgatctcggcattctcttcgctgccttcggtgaagttgctggtcaggcattgttcgcggatctcgcgatagcgtgcgcaggcctcggcaccggccggggtggtcgaataagtggcctccttgccgacccgctccccgctcaccagccccagcccctgcagcttcttcaatgcgtaggtcaccaggtgggtgtcttccacgttcagcacgaagcagatatcggccagccgcttgggccggccgcgatggttcacgtgatgcagcaccagcacgtccaggaaggtcaggtcgcgcacccccgccgcccccatgcagcgcaccacccagcggctgtaggcattgtaggcggtgttcagcccgaactcgaactcggacagctcggggctgcgcaccgacaccaggtgcgaggacgacacgatattggccccggccgcgcgcgacagcgcggtggccggccttgccttatcggcaacggcagaggcatcggccacggcggcggcggtatgcccgctctcggctggcttgcgtggcatgcgggagactcctttcgatgggacggcgctggcgtgctaggtataagcccggagcgcgccccggcaattttagcttgacagtttattggcgaattatgagcatgaacacctaataaatacaggtaaagcatgagggaggacgccggccacgactggccctgcgcatgtgcaccgcgcccttccccgtgccggcaggcggccgccaccatggcggtgcccgccccgccctcgcaccccgtttgcagaccccatgccatccatgcttcccgacctcgacaccctgaacacccgcctgcgcgacggcgccaccagccgtgcgcagatcatcgagcaggcggccgcgcttgccgccacgccggctgccgaggccgtgttcctgcacagcaccttcgaggccgcggcccaggtcgcgcgcgctgccgatgccgccggccgcgccggcaaggcgctgcatccgctggcggggctgccggtttcagtcaaggacctttacgacgtggccggcgaagtcaccagcgcagcctcgctggtgcgcaaggatgccgcgccggccaccgcggacgccaccgtggtcgcccgcctgcgcgctgcaggggcagccctggtcgggcgcaccaacatgacggagttcgcgttctcgggcgtgggcatcaatccccactacggcacgccggccaacccagccggcaccgatggcgtggcgcgcatcccgggcggctcgtcgtcgggtgcggccgtttcggtggcgctggggctggcggtcgcggcgcttggcagcgacaccggcggctccatccgcatccccgccgcgctatgcggcatcaccggcttcaagcccaccgcgcggcgcgtgccgctgacgggggcctttcctctgtcctacacgctcgacaccgcctgcgcgatggcgcgcacggtcagcgactgcattgccgtggacagcgtgatcgcggacagcgcagtgatcccgcgcgtcaccaaccccgccgcgacgcggctggcgatcccgcgccaggtcctgctggacgacctcgacccggtggtggcgcgcgcctttgaccgcgcgctgggccggctgtcggccgccggcgtgcaactggagcatgtcgacctgcccgagctcggcgaactggcgggcctgaacgcccagggcggcttcagctcggccgaagcctttgccatccaccgccacctgctggccgcccggcgcgacctgtacgacccgcgcgtggcctcgcgcatcgaccgcggcgccaatgtcagcgccgccgactatatcgacctgggccgcgcccggctggactggatcgcccgcatggaagcgcgcctggcccgcttcgacgccgtggtctgcccgaccgtgccgatggtcgcgcccgagattgcgccgctgcgcaccgatgatgcgcagttcttccgcgtcaatgccctgctgctgcgcaatacctcggccttcaatttccttgacggctgctcgatctcgctgccctgccacgcgccggacgagctgcccgtgggcctgatgctgtcgcacggcccgatgcgcgatgccggcctgctgggcacggcccttgcgttggaacgcatcgtgcaaccttcacagcgcgacgactgagccctgccgccgcgccgttgatcttgcgccggcgtgcccgccaatgcgggcacgaccggcaccaggtagtacgcaaccagcagtaccaccgcgcccccgcgcgcacaccaggagagatcgagatgcgagtcaaggcaatcgttgcggccggcctgatgctggccgccgtggcggcacaggcggataccaagtgggacctgccgaccggttatccggccagcaacctgcacaccgagaacctgcaacagatggccaacgacgtggacaaggccaccggcggcaagctcaagatcgtgctgcaccccaatggctcgctgctcaaggccaacgagatcaagcgcggcgtgcagaccggccaggtgcagatgggcgagatcctgatgtccttgctggccaacgagaatccggtgttcggcgtcgatgcggtgccgttcctggccaccagctatgccgacgcctacaagctgtggcaggcctcgcgcccggtcaccgagaaggtgctcgacaagcagggcatgaagctgctgtacgcggtggcctggccgccgcagggcatctatgccaacaagccgatcaattccgccgcggacatgaagggcctgaaatggcgcgcgtacaacccggccacctcgcgcatcgccgagctggtcagcgcccagccggtgaccatccaggctgccgacctggcacaggcgctggccactggcacggtcaactccttcatgtcgtcgggcgcaaccggcgtcgacaccaaggtgtgggagagcgtgaagtacttctacacggtggacgcctggctgcccaagaacatgctggtggtcagcaagaaagcgttcgcggcactggacaagccgacccaggaggccctgctcaaggccgtcgccgacgccgagaagcgcggctggcaggtctcggagcaaaagaccaaggagtacctggccaccctgtcgcgcaacggcatgacggtgcagccgccttcgccgcagctcaaggccgacatgcagaaggtgggcaaggtcatggtggatgactgggccaagggcgcgggcgaggacggcaaggctatcctggacgcctaccgcaagtaggctgatgtgcgctccctctcccctcagcgggagaggggagcaaacctgcctgatcgatgttcgtcagcaagcctgctgcccgcttgcctcaactgctgcccatcatgccaactgccccctcctccaagcgctggctcgaccgcctgcttgacctctttgccgtgctcggcgcgctgtgcatcctcgccgtctgcgtgatcatgatcctgatgtcgctgtcgcgggagacctcggtgatcttcaagggtggcgatgacatcgtcgcctggctgtgcgcggcgtccgccttcctgatccttggccagaccttccagcatggcggcatcgtgcgcgtcgagatgctgctgggggccgtgggcccgcgccggcgccgggtgctggagctggtctcgctgaccgtctgcctggcgtttgccgcctacgcggcctgggcgcttggcacctttgcgtggcagagctgggaaatcggcgatgtctcccagggccagatcgtgatcccgctgtggattccgcagagcttcgcggtgcttggctgcgtcggcttcctgctggcggtcgccgatgaatggctgcgcgtggtgcgcggacacaagccgcgctaccaggtggcccatgaagaaaagctcgccgccggcgatttcggggagacggtctgatgagcacagtcgtggttgcactgatcctgctgctggtgatgatcgtcttcctggcgatcggcgcgtggatccccgtggccattgcggtcacctcatgggtcggtctggtggtgttctcggaccgcgaggcgctggtcagcctggccaacgcatggtggtcgtcgagcgcctcatacacgctggcatcgctgcccctctttgtctggatgggcgagatcctgttccgcaccaagctgtccgagcagatgttcagcgggctgtcgccgtggctgagctggctgcccgggcggctgatgcacgtcaatatccttggctgcggcatttttggctcggtgtcggggtcgtcggcggccacctgcgccaccatcgccaaatcggcgctgccggaactcacgcggcgcggctacgacgagcgcactacgctcggctcgctgtcctgcgccggcacgctcggcatcctgatcccgccgtcgatcacgatggtggtgtacgcggtgtcggcggacgtgtcgatcatccgcgtgttcctggcgggcttcatacccggcctgctgctgatgctgctgttctccggctatatcgtggtctgggcactggccaacccggacaaaaccccgccgtcggagcacttcaactggcgtgcgcggctggcatcgatccgccagctgctgccgtgcatcgtgctgatcgcctttatcaccgtgatcatggtgaccggctactccaccgcgaccgaagccgcagcctatggcgtggtggcttcgctggcgctggcgtgggcgggcggctcgctcacgcgcgcggcgttctgggacagcctgatgtcggccacgcggctgaccgcgatgatcatgttcgtgctgggcgcgacctcgttcctgtcggttaccatgagctttaccggcatcccgcgcgcgctggcggaatgggtggcggcgatgcacctgtcgccgtgggcgctgatcgccgtgctgacagtgatctacatcgtgctgggcacggcgctggacggcatctcgatgatcgcgctgaccaccgcgacggtgctgccgatggtgcaggcggccggcttcgacctggtctggttcggcatcttcatcgtgctgctggtggagatcgccgaggtgacgccgcccgtgggcttcaacctgttcgtgctgcagagcatgacaggcaaggacagcaattacatagcaagggtctcgctgccctttttcatgatgatggtggtggcgatcgccatcgtcacgatctggccgggcgtggtcacctggctgccggacattgtcatgcagcaggaagtcaaatagcattggccggccccgcccgcggccatttgccgccggcccggcaatatggagggtcccagtccgatgcatgtgatcgtcatcggcgccggcgcgatcggcgtcagttccgcctggtacctgcggcaggccggtttcgacgtgaccgtgctcgaacgccgcgccgcgccggcgcaggaagccagcttcggcaatgccggcgtgatcgcgcccggctatgtcacgccatgggcggcgccgggaatgcccggcaagatcctgcgcacgctctttgcgcgcgaggcgccggtcctgttccgcccttccgccgacccggccatgtggcgctggatcgcgcgctggctgcgcgaatgccggctggagcgctaccgcgccaacaagctgcgcatgcagcggctggcgttctacagccgcgggtgcctgcaccggctgcgtagcgagctggagatcgactacgagcagtcgcaaggctacctgcagctgttccgcaccgcgcgcgacctcgacctggccgcgcccgccgtggccctgctgcgcgagaacaacgtgccgcaccggctggtcagcgcgcaggaatgccgccgtatcgaaccgggcctggcggccgacacgccgctggctggcgggctgcacctgccggaagacgagtccggcaactgcccgatgttcgtgcgcgcgctgcaccggcatgccgaggccgcaggcgtatcgttccgcttcgacacccgggtggcgcgcgtcaggcccgacaacgcgggcaagctgcaggtcgagctgcagcactccgacaagaagcgccctggccaggtgctgagcgccgaccgcgtgctggtcgcggccggcgccgacagcaccgcgctgctgcgcccgctgggcctgcgcatgccgctgtatccggtcaagggctactcggtgacggtgatggtccgcgacgaactgcaggcgccgctgggcgcgctgatggatgagtcctacaaggtcgcgatcacgcgcatgggcaaccgcctgcgcgtggcgggtacggccgagctgggctcacgcaagcttgatctgcggccggccgccctgaacaccctggtcaaggtcgcgcgcgactggttcccggtggcaggcaactaccaggaagccacgcaatgggtgggcgcgcggccgatgctgccggacgggccgccgctgatcggcccaacagccgtgcccggcctgttcctcaacctcggccatggctcgacgggctgggcgatgagctgcggatcgggcaagattgccgctgaccagatcgccgccagcgccggcacccatggcggcccggacatcgacatggagggcctgctgcccgaccgctacggcctggggcccgccagataaccacacatgacaccctctgcctctaccgccacctcgcacgcaaacggcgacggctggtttgcactcgatgccgctgcctccgaaccggttccgctgtacgacgtcgccgccatccgccgcatcgagaacgccgccttcacgcaactgcccgcctttacgctgatgtcgcgcgccggcgccgcggccgcgcgctggctggcctgccatgcacccgccggcccgctgctgttcctggccggccccggcaataacggcggcgatgcgctggtggccgccacgcaattgcacagcgccggccgtgccgtgcaggtatggctgacggcggacccgcagcacctgcccgccgacgccgcgaccgcctggcagcaagcgcacgcagccggcgtcccggtcagcgtggtcgcaggcatcgctgcctcgcatgacgcggactggcccgcgggcaccgctgcgctcgtcgacggcctgctcggcatcggcctgaaccgccccgccgacggcaccatggcgtggtggatcggacaaatcaaccgcagcgcgctgccggtgtttgcgctggacatccccagcggcctgttcgccgacaccggcgcgggcgcgccggccgtgcgcgcgcagcgcacgctgacctttatcgccgccaagcccgggctgctgacgctcgacgggcgcgactgcgccggcgaggtcgatatcgcgccgatcggccttgactatccgccggacgaaacgccccattgcctggtaaacggcccggcgctgttcagcacggcgctgccgcgccgccaccatgccagcaacaagggcacgcatggctcgctggcgctcatcggcggcaacctgggcatgaccggggcgccgctgctgggcgccagggccgcgcagttcctcggcgcgggcaaggtgcatatcggcttcctggcgcagcccgcaccgctgttcgatccgctgcatccggagctgatgctgcatgccgtggacgcactggccctcgctgccatgtcggcgctggtgatcggtcctggcatgggcacggacgccaacgcacacaagcagtttgcgcggctgctgcaagccgcgccgctgccgcttgtgctggatgccgatgccctgaacctgctggctgccgatccggcgctggccggggcactggccgccagcggcgcggcctgcgtgataacgccgcacccgctcgaagccgcccggctgatgggcgttcccgtcgccgaggtgcagcgcgaccggcccgctgctgccgcagcactggctgcgcaatggcaggccgtggtcgtgctgaagggatcgggcacagtgatcgcggcgcctgacggcagcccatgcacgctcaacccgagcggcaatgccgcacttgccagcgccggcaccggcgacgtgctggccggcatgctgggggcgctgctggcgcaaggcatggcgccgctggccgcggcccgggcggcggtgtggatccatggacgcgccgccgatgcccttgtcgcccagggcaccgggccggccggcgtcaccgcaagcgaactgtacgcgcccgcgcgcaccatcttcaaccagttgctggccggggcccgcgcatgacgcgcggcgcgatgctgcgcgatcccgccgaccgccgccacctgctcaccggcatcgccctgctggtcatcgggcaatggatcctcagcctgctcgatgccaccagcaagaccctgacgcagcaaggactgccgctggtggccgtggcatgggtgcgctatgtcggccatgtggtcgcgatcttcctgctgctcggccccgccggctggcggcaccagtggcgggcggcaaggccagggctgcagtggctgcggggcgcgctgatgctggtctcgacgctggtgttcttcagcgtgctgatgctgatgccgctggcgcaggccacggcgctgaatttctgcgcgccgctgttcgtggtggcactatcgccgtggctgctgggcgagcgccccgggcgccatgcccgctggatgcgctggaccggtgtggtggtcggctttgccggcatgctggtggtggtgcgcccggggggccagctcagtccgctcggtgtcggcctgggcctggtgtcggcgctggtgttcgcgctgatgcagatgctgacacgccgcattgccgcgcacgacacaccgatgaccacgctgatccagagcggcgtaaccggcgcctgcctgaccacgctgatcgtgcccttcttctggttcagcgcctggcctacgccgatgcaatgtgcgctgctgttgtccgcggggatcaccggatcacttggccattatttcgtcatccgggccttccagtacgcggatgcgtctttcctgagccccttcctctacctgcagatcctgtccgcgacggtaatcggctacctggccttcggccagttgcccgactggaccaccgcaatcggcatcggcatcatctgtctgggaggcttgtgcgtcgctgggggagaacccgtgctacgcgccatcgcggcccggctcggcggcgcgcgccgtcagacaatgtccgatacttagcctgcgcccacgctggtatgttgcaagtggtaacgatatgacgccgctgccaggccggatcccggcagcgctgacgatatacttgcatctctgtcttgtgagccggcaacgccacgcggctcgcgcaacctcgattgtcctgcatgcccactgaccttcacgcctggaacgccctgctgcggcaccacgacacccttcgcgacgcccagatgcgcgacgggttcgatcgcgaaggcgcgcagcgcgtcgcacaattctcgctggaagccgccgggctctatctcgactattcgaagaaccggatcacgcccgaaaccatgcgcctgctggtacagctggcagccgaggccggcgtgaccagacgccgcgacgcgatgttcacgggcgagcatatcaatacgactgaagaccgcgcggcactgcacgtagcgctgcgcgcgactgccggcgccggctacaaggtcgacggcgagcaggtcatgccggcaatccggaaggtgctggtacgcatgcgcgatttctcggaacgcgtgcgcagcggcgcctggaagggtgtcaccggcgagcgcatcaccgatgtcatcaatatcggcatcggcggctccgacctgggaccgcgcatggtgtgccgcgcgctgtcgcacctggccgatgccgatggcaatgccgcgccgcgcatgcactttgtttccaatgtcgacggcaccgacctggccgagacgctggtgcggctcgacccgcaacggacgctggtgatcgtctgctccaagaccttcaccacgctggaaaccatggccaacgcgcgcagcgcgcgcgcctggtttgtcgccaacggcgtggccgagcatgaccttgccaagcatttcgtcgcagtctcgaccaataccgaagcggtgcgcgagttcggcatcgacccggccaatatgttcgagttctgggactggatcggcggacgcttctcgctgtggtcgtcggtcggcctgtcgatcacgctggccgtgggcttcaacgccttcgccgacttgctggccggcgcgcgcgccatggacgagcatttccgcaccgcgccgctggaacgcaacatgccggtggtcctgggcatgctgggcatctggtaccgcaatttctggcatttgcccaccagctgcatggcgccctactccacctcgctggagctgtttcccgccttcctgcagcagctggagatggagagcaacggcaagtcggtgcagcttgacgggcagcccgtgcgcacgcatacctcgccggtggtgtggggcacggccggcaccaacgggcagcatgcctatttccagcagatccaccagggctcgcaggtggtgccggtggattttgtcgcgccgctggtgccgccgcgccggctggcaggccatcacgccaagctgctggccaactgctttgcgcaggccgaggcgctgatgcgcgggcgcagcgccgatgagctgcgtgccgccggcctgaaggacgaagtccgtatcgcccatatggtgttcgagggcaatcgccccagcaacaccttgctgatggaaaacctgacgccgcatgtgctgggtgcgctgattgcgctgtatgagcaccgcaccttcgtgcagggcgtggtctggaagatcaattccttcgaccagtggggcgtcgagctgggcaagatcctggcccgtccgatcgaggccgagctgaccgggaatgccgtcggccagcacgatgcctccaccacgtcgctgatcgagcgcgcccgcgcggtgctgaaggcgggcgccgccagctagacctccgcgcccatccattcatcgctggccacgcggccggcgtcgatggtcaggatacggccacagcgcgccgccaccgagcggtcatgcgttaccagcaccagcgttgagccggcatcgcggttaagctcgaacatcagcgcgatcacggcttcgccagtggcggtatcgaggctgccggtgggctcgtcggcaaacaggatgtccgggcgcgccacgaacgcgcgcgccagcgccacgcgctgctgctcgccgcccgacagcgtgcgcggatagtgccccagccgcgcgcccaggcccacgcgcagcagcatgtccagggcgcgctcgcgcacctgcgacgtttcgccgcgcagctccagcggcagcatcacgttttccagcgcggtcaggtggccgaccagctggaacgactggaacacaaagccgacatggcggccccgcacggcggcgcgctggtcctcgtccagcgcgaacaggtcctggccctgcagccgtaccgtgcccgtgctgggcaggtccagccccgccagcagcccgagcagcgtcgacttgcccgatccggacgcccccacgatggcgagcgtttcgcccggcgtgacggaaaaggtcacgtcgtgcaaaatcgtcagcgaaccggtcgtgtcggcaacggtctttccgagggactcgacagcgagaatggaagaagacatggatattgggatccgaggcaaatggcgccggctgctgctggcaaccggcatggcactgacgatatcggccggggcctcagcccaggctgcggcgccggcactgctggtgcttggcgacagcctctccgccgagtacggcatcgcgcgcggcgcgggctgggtcacgctgctgcaggaccgcctgcggcaggagcgcttcgattatagcgttgtcaatgccagcatcagcggcgagaccaccatcggcggcaagacgcggctgccggagctgctgtcgcggcaccgcccggccatcgtggtggtggagcttggcgccaacgacgcgctgcgcggattgccgctgcagaccactgaggccaacctgcgcaacatcgtcagcatggcacagaaggccggcgcgggcgtgctgctgatcggcatgcgcatcccgcccaactacgggcaggactacaccgagaagttcgtctcgctgtatccgaagctggccggcgagtacaaggtgcggctggtgccgttcttcctcgacaatgtcatcgcgcggcaggactggttccagcccgaccgcatccacccgaccgccgcggcacagccagtgctgctcgatacggtgtggccgcagctcaagccgatgctcaggcgcagcggcgcgaagtaagaataaaaaaaacccctgccgcctggcaggggtccttgctggcagcggggctgccggggctgatctggcgcttactcggcgccttgcggctgcgtggcacccaccggcgtcagcatcttgaccttcgagcgtgccttcaggctttcatagaatgcctgcaggtcggtctggccggcgagctgcgacagctgctgcgcttcggcctggcgttgcgccgggttggcctgcgtcggctggctgaccttggtgatacggtagaccgcgtagccttcggcccccaggtcgacacccaccaccgcgggcagcttgttcgcatcggcgcgcagcaccgcttcgaccgccttcggcggcataccctcggccttggcgcgcgacacggtctgcaccgcgccaaagccgtcggcgctgtctgccttcttcagtgcggcaagccgggcctcgccgtccttgcgcgccagttcggccgcctgctgggcgatatagccctcgcgcaccttggcttcgacttcctcgaacttgcgcacggccgccgggcggtactcgacgatgcgcgcggccaccagcgtgttcggggccacctggacggcctcggtgttgcgcttattcttgatcgcgtcgtcgctgaacagcgccttgagcagcttgtcgttgttgagcgggctctgcgcgcccagcgccgggttcggctggcgcgtgacgttgtcggcggtctggatggtcagcttgaacttgtcggcggcgggcttgaggctgtcagcctgctcatagacggtgttgccgaaggcatcggcctgctcggcaaacttcttgtcggcgaactgcttgcgcagctcagcttcgagttccgtgcgcacggcttccagcggcttggtctcggcgggcttgatgccagtcagcttgatgatgtgatagccgtagtcggtttccaccacgtcgctgacctggccatccttgagcgcgtacatggcgtcctcgaacggcttgaccagcgcgccgcggcccatgaagcccaggtcgccgcccttctcggccgagcccgggtcctgcgagttcttgcgcgccacgtcggcgaaggtgtcagggtgcttgcgcaggtcctccagcagcttggtggccttgtccttcgcggcctggcgctgggcggccggcgcatccttcggcgcgctgatcaggatatggctggcgcggcgctgctcgtcgatgcggaagcgcgcgatattgctgtcgtagtaggacttcagctcttcgggcgtgaccgcctgcgtcgcggccagggcctcgcccgacagcagcaggtactcgaccttggcttgttccggcaccgagaaggcctgctggtggctgtcgtagtaggccttcagcgcggctgcatcgggctgcaccttggcggtgtagccggccggcttgaacagcagcgcctgcacatcgcgctgctgatcgcgcacggcgatcaggcgatcgagcagcgacttgggcacgaatgccgtcgcggcgaccgatgcgcccagctgctgcgtggccagctcgaagcgcatgcgggcatcgaactgctcgggcgtcatgccctgcgactgcagcagctgcaggtaggccttgtcgtcgaccttgccgtccttggtgcgcggcaactgcgcgatcgccggcaggttgctgatttcctcgagcagcttggcgtcggacacggtcaggtgctcacgcgccacggcactggccatcacgcgctgcaggatcagctggtccagcacggccttgcgggcgtccgggccttcgaactggcgcgggtcatagctggcgcccaggacctggcgcgcgcgttcgctctggtcgcgcacgacgttatcgatctcctgcacgctgatggcgcggccgtcgaccttggcggcatcgtgcgagctgtccatgaagcgcgaatagctttccacgccgaagaacacgaacgacgggaaaacaagcaccagcagcagcaagagcatcaggcgccggttgttgcgtacgaaatcaagcatgcggattcgggtagtggattggcacgaaagacaaactccacaattctatcaggagccgctgggcacgcacccttgtgcagggtgggaaacatgggggagcaaatgaaaaacgcccgctaatgcgggcgtttccgtaaaactggcggagtggacgggactcgaacccgcgacccccggcgtgacaggccggtattctaaccgactgaactaccactcctgtgtcggcgcttgctgctggcgatgcacatgcccttgcgatggcgagtagcgggtgctgaggacgccttgcaagggaatcgaatttccttacaaatcataagcctacaacgcctaccaaccttcccttgccgaccgtgccctgctgcaagaggccgaactatagctcgtgttcatcatctgcgcaatacccggatgactcaaccttgtaccctcgccgctctgcccgatgaggtggcgttcagcgcaaactccttactcctcaatccgtatccttgccgccttgacagccgcgccccatcgttgattctcagcctggacaaattcaccgaacttcttggggtcaatcgtgattggcgtatagcccatgtcggcgaggcgtgcacggaactctggttgggacgtggcgcgagtcacctgcgcctggatggcatcaaccaccacttgcggcgtatttggcggagcgagcacgccaaaccaggtgtcagcgtcgatggcatagccactttcggtgagcgtaggaatctccttgattgacgggaagcgctcaggagatcccaatgcataaagccgcagtttggtcttgttggcgaccgccaaaggtgtgggaatgaatgcatagtcaacttgaccacccatgacagctgtcatgaccggtgcagcgccgccgaacggcacttcgagcatgttgttgatgtgcgccttggtcttgagcaattccatgcccatttgcgccatgctccccggcccccaatgaccataggaaagtgagctggcttttgccttcgcgacgatgtcctggacagtcctggtctcggcatctggacgacttgccagaacgaagcccatcttggctacgggagcaacgggccggaagccattgggctgaaactggacgaccttcttgtgaatatacggtgcgactgaaataaagtcggcggccgcaaacagcaacgtgtacccatccggtggcgatgcataagcgacattggcaccaatcacgccgttggcacccggccggttctccaccacgatgggttggccaagtccgttaccaatgcccgccacgacaaggcgggcgagtacatccgttcccccgcctggcgcatacggaacgaccagccgaatcggtttagtgggcgtccaccccggttgagcgtttgccggattggccgcccacattgcggcgaacagcgtcgcagcggcgcccacaaggcgaacgcctcccttggcgcttccagcaaagcgccccactgataccatgaagttcatgttgtctcctgactgttctaatgtgccatcgtgtggttcgcagtcatctgtggactgcctgctgcgctgcatgctcgccggcaagctttccgaataccgcgcctcgcattaccgacgtagcccccgtgtagacctggtagtaaaggcccgatgcttcgcccgcggcatacagtccggggatagccttgccgtcggcgtccacaacctgagcgtcccgattgatcttgatgcctccgaacgtgaaacaaatgccaggcatgatcggataggcatagtagggtgcgctggcaatggggcgtgcccaattggacttcctggggagaatgcctgaggtcgcaagatggtcctcttcgagcggcatgaaagtcccggtagggcaagccgcgttgaaccctcgcacagtcccttcaaggccctcagcggaaatgccgcaacgctgcgccaactctgccagcgttcctgcctggagggggggctgatctgtgcgaatgccttttctccagttcggcacatcgttgatccgctcgtcgaagatgacgtaagcgatgccgtctggctggtccttgatcgcacgggagatatgatcgtaatgcacgtcgaccggtcccggcgcctcatccgtaaagcgtagaccgagcttgttcaccaggatcccatacggaaaattcatcacaagcgcttcgacctgtgcggatcggggatccagcggctcggcgtgaaacgagctgaaatctccggctggtgccgcacccaggttcagcgccatgcggattccttcgcccttgttgtagtagccgccgcgtgcgacaggacggatatagcgcgccgcgggccccatgtactgcgtcagcatttccggattgccttcaaatccacccgacgcaatcacaaccgagcggccgaggagttcgaatgcattcccatcggcgccaaccagacccagtcgaagctggccattggcgtcgcgccgggacagcgagtttgctgtcgtctcgtagtagaacttgacgccaagatcgccagcacgcgcatgcaatgcctcgatcatggccaggcctccgccaaccggcattagccgaggtgccgccgccgtgacgaagtaagtgggcagcgcgtcaaagcgaatgccaaaggtctggagccactgcaccgtcgggccagcttcgcacgaaagcgtcgacagcagttcggggtccggcatgccatgtgccttcacgtacgcgggccactctgcatacggtgcggccatgctgcgaacaacgttgggatcgagattgtcgcccgcattggcgctcagcaagtcatcgaaatcgtcgctgacctcggtatcgctcttcatgcggaagtacgcctcggtccatcgcgtgttgccgccatactctgctcgcgtggcgcgctcaagcacggccacgcgagcacccttccccgcggcagccacggccgccgacaagccggagatgccgcaaccgataacgacgacatcgtagtaggcggcactgtgtgcagcgctcatcgtgcgtctcctcttttttgcttttagtacttccggacaaacggatccggcatctcgagatcggtggatacccatacgctcttggtctccatgaactccttgaccgcctctgtgccaccctcacgccctagaccgctatccttgtagccgccaaatggcgtggtgaaactcgtggagcggtagttgttgatccagaccgttcctgcttgcaagcgctcagacatgtacatggctcggtgcagactcttggtccatacgccggccgcgaggccgaaccggatatcgttcgcgatgcgcagcgcatcgtcttcatccttgaacttaagcacagacagtacagggccaaagacctcttcctgcgcaatgcgcatgtcgttggtcacattggtaaaaattgtcggctcgacgaactgacccgcgccgtagtccgcgccgctgcgcgtcttgccaccgaaagcacaggtcgccccgtcttcccgagcaatgcggatgtagtcgaccaccttctcaaactgcggacgggtcgccacaggccccatctgcacatccgaacgcgcgggatcaccgagcttcgccttgctcgtgattgcaaccagccgatcgacgaactcgtcgtgaatgctctcctgcagcagcaatcgcgagccggccatgcaagtctggccacctgccgagaagatcccggtgatgaccccatttgctgcgttggtgaggtcggcatcgtcgaagacgatattcggtgattttccgccaagttccagggtgaccttcttgaagtgtgccgccgcggcaagattgacgcgtcggcctccttcatcccccccggtaaaggcgatcatgggcactagcggatgctcgaccagcggctcgccgacatccctgccgaatcccgtcaccacattgaagacacccggcggaaagcccgccttgacgaacagcctggccagttccagcagggatgccgaggtgtgctcggacggcttggctacgatcgcattgcccgcacaaagggcaggcgcaaccttccaggctgtcagcagcagggaagaattccacggcgtgatcgtgccaacgacgcccaccggctccagtcgggtgtagttaaacaccttcggcttgtccatcggcacgaccgcgccctgaatcttgtccgccatgcccgcatagtaatagaagtacttggcgacatagccgacctggcctcgtacttcgctgcgcaatttgccattgtcacgcgcttccacttccgtcagcagatcgatgttctcttcgatcagtccggccagcttgtacagcagcatcccgcggttagtcgccgacattttggaccatggccctttcatcgctgcggcggcagcctgagccgcgcgatcgacgtcttcgcgtgttccgcgcggaatctcggcccatgcttcgccggtgaacggatcgagcgattcaaaccattgacctcggctcggatcaacccattcgttattgatgaagagttggtatcgcggctgcatctatgtctcctgaggtgagtaaggccagcgaaaagcgctgtattgtggggatattctggcggccacaacgcgcgacggcaaacgagaagaactgtggacttgatgaggttttctcacgatctggaggccgcaagattcagccggaatgcagccgccagcgcgtctgccacacgcgcaaggttttggctgttgagcgcagcgatgcagatgcgacccgagtcagccccgtagatggcgcactcttcgcgcaagtactccatttgggcttgtttgagaccggaatagctgaacatgcccttctggcgttcgatgaaggcgaaatccttatcgacacctcgggccttgagcgcttcacttaactctgtgcgcatgcggcagatccgcaggcgaatcgcttcgagctctgcctgccaatgctctcgcagcaatggcgtggtcaggacctgcgtgaccagccgcccgccatgggatggcggattcgagtaattcgtacggatcaggagtttcaactgcgagcgcacgcgcacagccacatcttctgtcggacaaaccacagagagggccccgactcgctcgccgtacagcgagaagttctttgagaatgacgtggccaccatgcatggcaatcctgcctccacaaatgcgcgagccacacgcgcatcggcgtcgaggccatccccgaagccctgatatgccatgtcaatcagtggtatcagacgtcgctgcgcgatgatatcgatgatcgccggccaggcatcctggggcaggtcgtacccggtcgggttgtgacagcaggcatgcaagaccacaaccgtcccggcacttgcatgcgacaggtcggtcagcatgccgctcaggtctggctgctccgcatcgcgcggaaggtagcgatacgtatgaacctggtaacccgcccttgacagtactccgcggtggttttcccaagtcggctcgctaatcagggcacgcgcaggcgccccccatcgtctcgcgaattctgcgccaaggcgcagcgcactggttccgcccaccgtttgcaccgtggcaacgcgcctggccagcgccgagtccgcgtcgataccgaagacgatgggaagaactgcatgctggaaggccacagtgccgtcgataggctgataaccgcgcggcagcctcgccgctaccaggtcagcctcagcgtttgcaatgcattcgagcaggggaatccggccaccatcgtcgtggtagacacctaccgcaaggttcaccttctcaggacgcggatcgtgtgcaaattgctcgttcaggccaaggattggatccctgggagccattggaagggacgtcagaaacatcttgaactcgctctacttggtgggagcgagtcattctccgtgtcgcctggaacggcagtaaaacgagtttttctccagtactgatgcgcctggcgcaagtagcccccaaaaagttacgcgaacgcaacttatcgaccctactttagccgggatttccactccgcttcgatcccgaccacccagtctcgaaatagctgcacgagcgccgagtccttcttccgttccggatacacgaggcaatagcgcttctcgtgcttaagagacagatcgaacggcacgacaagatcgttgcgctcgatctcatcttgtacatacatgcggggaaccaggccagcgcctaaccctgctcgcgcagcttcgatgaccatgccgtacaactcgaaatgcatgctcgaaaccggtgtaaagtccgccaccgcggccatcgcaaaccagtgccgccatgcttctggccgggtggacttgtgcaagagcggcagttccgccaagtctgccggcgcacccaagagctgggtgtcaaagtagcgggggctcacgatcgggaccagttcttcgtcaaacaggtcgacccttaccacattggtccaggccggatgctcgaaattgagcgccgcatcgaagttggtttcgtcaaagctaaagggcagtgggcgctctgagagattgagaataatgtccggatgacgctcacggaaatcgcgcaggcgcggcagcagccacctgtttgcaaacgtggggatcaccgccagttcaagcacgccgccaacgcccttgtgcgccatcagagcggaggtgtgtgcctctatctccgcaaggttacgcgcaatattcttcagatacaggcggccggcatcattgagaacgacctgcttgcggacccgcgtgaagagcttgacgcccagatatgtttccagtgtcgcgatctgcctgctcacggcgctctcggtcaggcacacctcgcttgccgcacgggcaaaactgccttgccttgctgccgcctcgaagaccgccagggcgatcgtgcttggaatcttacgtctcatggctcacatccacgtcttgcttactcagattgcattagttgttgattattactcagttgcccgtattacgcggtttcgccaatactccggggcaacccgcatggtcctgcagacggcggatacgatccggaaatgctatgacccagaacttgatggcacgaattcgcgaggcgattctcgatgccgcacccttagagcctcttgtcagccctctcgaccgggatcaggccattaccttgctgcaggatgccatcctggctgacgacatcgaacgtcagatcatctgcctcgctgccgcggtggagctacacgcggttgtttcccaggatctgtggcgacattgcgagcgcaaggccggagacagtggcgatgccgcattgagtcgactgttccgcagcgcgcgtggccgatccttcgccaggatgatgcgctgatacgcatgcctgacaccggcgcttgctgttcccactgttgcatatggctattttacgatctgcaacagctcgacccgccccgcctcgagccgcgcctgcatcacggcgtgggcctgccactcggctgccaattccgcctgcacgctcaggcgcacatgcgcgcctggagcgccatcagctcatgcttgacgaccttgcccgcggcattggtcggcagggccgccatgaaggccacggaacgtggcaccttatagtttgccaggcgggctttgcaccattccagcaatacctccccgctcatgctctcgccttcgcgcaacaccacgaaggtgcggccaacctcgcccaggcgcgtatcgggtacgccgaccaccgcgacctgcgccaccgccggatgcgtgccaatcaggtgctcgatctccgcgggatagcagttgaagccgcccacgatgaacatgtccttgagccggccggtgatacacaggtttccggcggcgtcgacgctgccgatgtcgcctgtatgcagccaccccgcgtcgtcgatggcctcgcgtgtggcggcctcgccgtcgaagtacccacgcatgacggtgtagccgcggatccacacttcgcccgggtcaccgccactcagcgagctgacggtacgatgagcagacgcatcgccctggccggagggtgccatggcgaaaaaatcgtctcgggcgcggttgttttggtccatttggactatgtcgcaccccgcgtgaccggaaacaatgcgcctatcagccgcgaatatcggccgacatgtcgccgctgcgcgaccaaccatgacatccgggagagacatccagtgacgacccaacaccctgtcaccgacgattttcgcgtgaccctcaacacgccggccagcgcggtcgtggttaccggcggcgcgtccggcattggcgaggcttgtgcagcggccctgtccgccatcggccggccggtcgccatctgggatatccaggaggacaaggcgcgtgccgtcgccgcggcgctcgccgaacgttatgacgtgcccaccttcgggctcggcatcgacctgcgcgcccccgccggcctggaacacgcgctggtccgcacccgcgccgccctgccggcgctgggcggcatggtgcatgctgccggcgtggtggaccagagcgggatcgacggccttacacaggcgcgctgggacgcggtgcttgatgtcaacctgcgcgccatggccctgctggtgcaagccatgctgcctgacctgcgcgcgcaacctggcgcggcagtcgtcggcatcgcgtcgatcaatgccacgctgggcaacgccctgattccggcttactccgcctccaagggcggcctgctctcgctggtgcgctcgctcgcggacagcctgggccgcgacggcatccgcatcaacgccgtctctcccggacagatccacacaccgatgcttcaacctgccatcgatgccctgcccgaaggcaccttcgagcgacgcatccagctgggccgcctcggcacccccgcggagatcgggcgagtggtccgtttccttctgtcggacgaggccagctacgtcaccggcaccgagctcatcgtcgacggcggcaacattccttcgcagcgctgaatcggagcgccctgtcctgtggctgctgggccgttctcatactgggtcgccatcctccggccggacgtccagccctggttcttccgtcagcctttcgacgctcgaggctcaccgcgggacgccctatgcagtcctggcccgttctgcaagcagcttcagcagccgtgcctcgtcggcacgcaggcggctgacgatggcgacgcgcgcgcagtcctgcaatccgtcgtcgatgaaggcctcgatcaccgccggatggacatagcacttgcggcacaccgccacggtgttgcgcaggcgctgggccactgacttgatgacctcggccacgcacttcctgcgcgctgcttcgccgtccgcgccggccgcgcgcagcagcgcgagcgcatgcacgctgcccgcccaggtgcggaagtccttggcagtgaagtcgccgccggtcgcctgttgcaggtaggcgttgacgtcggcggatccgacctcgcggatctcgccgtcgctgtcgcgatacttgaacaggcactggcctggcaggtcggcacaattgcgcacgatgcgggccaggcgcggatcgttgaccgatacgtcgtgggtgatgccgctcttgccagtgaactggaaacgcagccggctgccgcgcacggtgacatggcggcggcgcagcgtggtgaggccgtaggtgcggttctgccgcgcatattgcggactacccacgcgcacaagcgtggcgtcgagcagttgcaccaccgccgcgaccactttttcgcgcggcatgccgttgcggcgcaggtcgcgcgcgacgcgcgcccgcaagcggggcagtacgctgccgaaggccggcaaccgcgcgtatttgtccgaatcgcgctgcgcgctccactcagggtggtagacatactgcttgcggccgcgcgcatcgcgcccggtcgcctgcaggtggcccgcagggttcgcacagatccacacttcctcgtaggcaggaggaatcgccagcgcagcaatgcgtgccagcgtggcggcatcgtccacgcgcttgccgttggcgtcgatgtaggcaaagccgccgccctgacggcggcgcccgatgcccggcatactgtcatcgacataacgcaacccggcctcgcgcaataccgtacgcaacgctttgtcggcaccattagtcgggagggcactatccaaggctgggtctctttccggggctgccagcgcgccgtccgggtcttccggcgctttatgcgtgcgggccacagtggccttgcccgcgctgcgcctgttcgtggtaatggcaaatgcgagccagcgcccagtcggcagcggcttcgcgtacggcgttacgcgtccccggaaagcgccgcgtttccgtgaacgcggcaatacccccggtgctccgcagcacatcacgcgccgcatggccgtggcggcggaacacccaggcaaagcactgcgtgcccgccgggatatcgccatcgccgccatcatcggcgacgccggtgttggcgatcgcgaggtcggcgccggtcatctccatggcgcccagcgccatcgccagcgagaccgcctcgctggtcagtccgtgttgcctgatggtctcaggcggcacgtgcagcaactgttccttggccgagggcgaatacgccacgatggcgcagtgcaagacatctccgcaacccggcacctcggcgatgcgcgaggcgatcagccccgcggtacaggactccgccgtgaccacatgcaaatggtggcgcagcaaatagcgcgcaatgctgccgttgtcgctgccgttttccccaagcgtcatcgctgcgcctccgacgcctgcacagacactccgttgctgcgcgagacagcatgcgtggccggtgctgcgggtacgcggccgtcgccgccgcggcccttcacgaacgtcaccttgccgtcgcgctccagcaccacccgggtaaggtcgtcgaagctgtcggtctgaagtgtcgcacgcaggttggccttgaggtcctcctcggtcagcattgcgtggctcacgcgctcccggtccagttccccctcgcgcagcaggtccagcgcgtggccgccagtggcgcggtcgaatgccggagaacggctcgacagccagcccaccacccggtgcagaagcaccaatgccagcccggcggaaaacgccaccgcgaacgaagtggccccgaccacggcgcgcgacaacaccgcgcccagcagcaacatgatgcacaggtcgaacgatgtcttttgcgcgaaggcccgcctgccggccaaccgcagcatcgcccaggtgccggcgaagatgatggcggcacgcacggcgccttgccaccacgccaggtcgtcaccttcgcccacgagcttgcgcatcgcatcgacgatcacttccacgctgtccatgtcggcgtccgcagtcgatttcctgactggttccgcaagttccgcgccaggctcacgacactgggccgtgctgccgtgcacgtcccatatgcgctcattcgcgcgggaatgcggggaaatcgtacgtgcagtgccgggccaggcctgaaaaaactgcgcagagcgcgcgcaacatcgggagcgaatagcgcttatctgtgggacgccggaaaacaccggccgggagcgccatgccgagcaacggcggaacagcaatttagcgcgcggctcggccggagggagatgaaaataccaacaaaaaaggacttagatcgctctaagtccttgattttgttagtcaagcgtggtgggtgctgaggggttcgaacccccgacctacgccttgtaagggcgccgctctaccaactgagctaagcacccgctcgaccatcacaggctggctgcctgcaacttgctgatcgctccacacctcgcggcagttgccgtggtttgcgttgcgagggcgcaagtgtaatacaggtgatttcggtttgccaaggcctgtgcgcgcaaaaaaacgccgccgggcatcgctaccccgcggcgtttcgttcatgcggccaaagctgtgtcagtgatgcagacgctcaaccttggccgtggccttgtccgccacttcggcgggcttggcatcttcttcaggcaacgcctcgggcttgcgctcgagcgccagttccagcaccttgtcgatccagcggaccggcacgatctcgatggcgttcttcacgttgtcggggatctcggccagatccttgacgttttcctccgggatcagcaccagcttgatgccgccccggtgggccgccagcagcttctccttgaggcccccgatcggcagcacctcgccgcgcagcgtgatctcgccggtcatggcgacatccgcgcgcaccgggatgccggtcagcaccgacaccagcgccgtggtcatggcaccgcctgcggacgggccgtccttgggcgtggcgccttcaggcacgtggatgtggatgtcgcgcttctcgaacatctcatccgtgatacccaggcgacgtgcccgcgaacgcaccaccgaacgtgcggcctcgaccgactccttcatcacatcgcccagcgaaccggtacgcgtgatgttgcccttgcccggcatgatcgcggcttcgatggtcagcagatcgccgcccacctcggtccacgccagaccggtgacctggccaacctggttttccttgccggccaggccgaaatcgtacttgcgcacgccgaggaatttgtccaggttctcggaatcgaccttgatcgtgcccgactccttcttcagcagcagcagcttgaccaccttgcgcgcgatcttggagacctcgcgttccagcgaacgcacccccgcttcacgtgtgtagtagcggatgatgtcgcggatcgcgctttcggcaacctcgatctcgcctgccttcagaccgttgttcttgatctgcttgggcaacaggtagcgctgcgcgatattgaccttctcgtcctcggtgtaacccgacaggcggatcacctccatacgatcgagcagcggcggcgggatgttgagcgagttcgacgtggccacgaacatcacgtcggacaggtcgaaatccacttcgatgtagtggtcctggaacgtgtggttctgttccgggtccagcacctcgagcagcgccgacgacggatcgccgcggaaatccatgcccatcttgtcgatctcgtcgagcaggaagagcggattgcgcacgccgaccttggacaggctctgcaggatcttgcccggcatcgagccgatataggtcctgcggtggccgcggatttcggcctcgtcacgcacgccacccagtgccatgcgcacgaacttgcggttcgtcgcgcgcgccaccgactggccgagcgaggtcttgcccacgccgggaggcccgaccaggcagaggataggtgccttcaccttgtccacgcgctgttgcaccgcgaggtactcgagaatgcgttccttgaccttctccaggccgtagtggtcttcatccagcacgcgctcggcgttggcgaggtcgttgttgaccttgctcttcttgcgccatggcaggttcaccagcgtgtcgatgtagttgcgcacgacggtggcttcggccgacatcggcgacatcagcttgagcttcttgaattcggcgtcggccttcttcttggcttccttcggcatccgcgcagccttgatgcgcttgtcgagttcttccaggtcggcgccttcttcgccctcgccgagttccttctggatggccttgacctgctcgttcaggtagtactcgcgctggctcttctccatctggcgcttgacgcggccacggatgcgcttttcaacctggaggatgtcgatctcgccctcgagctgcgacagcaggctttccaggcgttcggtcacattgaccatctccaggatcttctgcttctgctcgagcttgatcggcaggtgcgcggcgatggtgtccgccaggcggcctgcctcgtcgatgcccgacagcgaggtcaggatctcgggcgggatcttcttgttgagcttcacgtactggtcgaactgcgacacgatcgcgcggcgcagggcctcggtctcggcgctttcgccaggtgcgggcggcacgggcacggcttcgcacataaagtgcgcatcgtcctcgctcacctcgcggatattcgcgcgctgggtaccctcgaccagcaccttcacggtaccgtcgggcagtttcagcatttgcaggatattggcgatgcagccgacctcatacaggtcgtcggcggtcggctcgtccttggccgccgtcttctgggccacgagcatgatgctcttgcccgcctccatcgcagtctcaagcgccttgatggacttcgggcgtcccacgaacagcgggatcaccatgtgcggaaacaccaccacgtcgcgcagcggcaacagtgggaggcgaatcggctcggccgggaggagttgtgttccggacatcattttccccaagtcagtcatttaaggcgtaaattgggccgcccgaatcgattacaagatacgtgccaatcgattcatcaaggcaggcagatgccgctccctgcacttgctggcccctctgaaacagcatacccgcgtttcctccctctcgtcggtagaaataaacaaaaaaagccgctcgcttctacgcgaacggccttttcgcccggctgccggtgtggtcccgaccacttaccacgtctggcagccctcgcgtcagttggaccccgccaccttgggctgctgctcttcgtacatcagcagcggaggtgcatcgccgttgatcgtattttcatcgatcaccaccttctgcacgcccttgtagttgggcaggtcgtacatgacgtccatcagcgactgctccaggatcgaacgcaggccacgggcgccggtcttgcggcggatcgccttgcgggcgatggcgctcagcgcacccgggcggatttccagctcgacgccttccatagccagcagcttctggtattgcttgaccagcgcgttcttgggctcgaccaggatctgcatcagcgcggcctcgtccagcttggacagcgtggcgaccaccggcaggcggccgatcagttcggggatcaggccgaacttgatcaggtcttccggctcggtctgcggcagcacttcgctggcgtcgcgctcttccttgctcttgacctgcgcggcaaagccgatgccggtcttgtccgagcgctgcatgatgaccttctccaggccatcgaaggcgccgccgcagatgaacaggatattggtcgtgtccacctgcaggaagtcctggttcggatgcttgcggccaccctgcggcggcaccgatgccatggtgccttcgatcagcttgagcagtgcctgctgcacgccctcgcccgacacgtcgcgggtgatcgacgggttgtcggacttgcgcgagatcttgtcgatctcatcgatgtagacgatgccgcgctgcgccttctcgacttcgtagttgcagttctgcagcagcttctggatgatgttctcgacgtcctcgcccacgtagccggcttcggtcagcgtagtcgcgtcggcgatcacgaacggcacgttgagcaggcgcgccagcgtctgcgcgagcagcgtcttgcccgagccggtcggcccgatcagcaggatgttgctcttggacagctcgacatcgtccttcttgccgaggtgcttgaggcgcttgtagtggttgtagaccgccacggccaggatcttcttggcctgttcctggccgatcacatactggtccaggctttcgcggatctcgtggggcgtggggaggtccgagcgcgcggccgcggcggcgtctttctcggatgccgtggcctcgtcgcgaatgatctcattgcacagatcgatgcattcgtcgcaaatgaacaccgacgggccggcaatcagcttcttgacctcatgctggctcttgccgcagaaggagcagtacagaagcttttcgctggatgaaccttttttgtccgccataggaatcagtcacttatgcagggcgcacaccgcggggcgacaggctccccagcgatacgcttcaaacgcatcatacgccaaaacaattggcaccaccggcggttccccccggctgtggggcaaaagcaaaaaacgaggcacggggcctcgttccggtgtagccttcgccatttgagcccgtgccagcctggccggccgccgctgcggattgcgccacggcggcccgctgcatcagccgcggcgggcgaggaccttgtcgatcaggccgtagtcaactgcctggtcgccgctcatgaagttgtcgcgatcggtatcgcgcgcaatcttctcgaccggctggcccgtcacctcggacaggatggtgttgagccgctcgcgcaggtacaggatctcgcgcgcctggatctcgatgtcagaggcctggccgcgcgcgccgcccagcggctggtggatcatgatgcgcgagttgggcagcgccgaacgcttgcccttggcgccagccgccagcaggaacgcgcccatgcttgccgccatgcccatgcacagcgtggacacgtccggcttgatgaactgcatggtgtcgtagatcgccagccccgccgatacggaaccgcccggcgagttgatgtacagcgacacgtccttgtcggggttctcgctctcgaggaacagcagctgggccaccaccaggttggcggtctggtcgttgacctcgcccaccatgaacaccacgcgctccttcagcaggcgcgagtagatgtcataagcgcgctcgccccggccggactgctcgacgaccatcggcaccagccccaggccctgggtttccagtgccgaagcctgcgtggtggcgagacggtcaagcaaatcattgcgggtcatgcatgttctccatggattcgtcggatcgcaaggcaatccggggtaactcgggaagctgcccccgccccacgccgtggcgcggggctgcgggtcacttccggcctcaggcttgctgctggttgccttcggcggtgagttcctcgaaggacaccttcttgtcggtgaccttggccttgccgcatacgaaatttaccacgttgttttcgagcacgtaggcttccatttcggccaggcgctgctggtcgccgtagtaccagcgcatgacttccttcgggtcttcgtagctcttggcgaagtcctcgatctcggccttgatctggtcagccttggcttccaggccgttggccttgacgatctcggccaggatcaggcccagcttgacgcggcgctcggcctgctgcgcgaacatctcggccgggatcggcatgtccttggcgttgggcatgccacgctgctccaggtcgcggcgggccatttccaccaggcgttcctggtcctgctcgatcagggccttgggcacctccagctcgctggccttcagcagcgcttccatgacctggtccttcagcatggagtgcgtgcggcgcttcacttcgcgctcgaggttctcgcggatgtcggcgcgcatcttctcgacgctgccgtcggcgatgcccagcgacttggcgaaggcatcattgacttccggcaggtgcgcccactcgatcttcttcagcgtcacggtgaactcggcggtcttgccggccacttccttgccgtggtagtcctccgggaaggccagcgggaaggtcttgctttcgccgaccttcaggcccagcgcggcctgctcgaactcgggcagcatgcggccttcgcccagcacgaacgggaagtcctcggccttgccgccggcgaactcttcaccgtcgatcttgccgacgaagtccagcgtcacgcggtcgccgttctgggcggcgacgtcggcaccgccgtcgccatgctcgccggcttcgccgcgggcgtggtagtgcacgcgctgcttgcgcaggatgtcgatggtcttgtcgacttcggcatcggtgatttcagtgccggtgcgggtgacttcggcagccgacaggtcgccgatggtcacttccgggtacacctcgaaggtggcgtcgaaggcgacttcgtcctcgcccacgccttcgttcttgatctcgaacttgggctggccggcaaccttgacgtcctgttccttggtgatgtcgaagaacttgcgcgcggccttgtcgaagcgcacttcgaactcgacctgctggccgtactgcttctcgaccatcttcatcggcaccttgcccggacggaagcccgacatcttcacggtcttcgacaggcgaaccaggcgctcctgcttttccttctccacttcggccttggggatggccagggtcaccttgcggtccagcttgccgaggttctcaatcacgttcgacatggtcgtagatccaatccagaaaatgtagttgtgttcgtaggtgctaccgcttgcgcatgtaccgcccgctttaccgccacggcgccgtcacgacaggacggccggggcggcgcaccggcgaacgggcagctccgcgcaaacggaaaacgaggattatcgcacggttttcattcgcttccggcagattttgcccggaacgggcctggaaccgcccgccggacccgcggcgctatcccgtgtgcccgtgacgcagcgcgcgcagcagcaggcgtgccggatccatcgcatcggccaggtccgactccagcggcagcggctcgccctcgatctggctggccagcagttccgcgcccagcgctgcccaggtgaggccgcgcgagccatatgcaagggcggcgtagagcccgggcatgcgcggcaggtcccgcaagtgcgcgccgcgcagcgatgcggcctgcgccagcgcggcggcctcgtcaggcacctggccgaccagcggcagccggttgtgcgtgaccgtgcgcacgccgacatagccggagagcgtcgcgggatcgatggcggccacggcatcggcctggcgcggcagcatgccggacaggcgcgccaggttggccgcgtggaccgccggctgctccaccagcgggccctcgtcggcgtcgtagctggagccgacccggccagcgccgtccgcggtgcgcggcagcaggtagccggcaccagtcaccacgcaatccggccagccgccgagcgcatccacctgcgcggatgccagcgtggtcagctgcccgcgcacgcgccgcatggtccagtgctgctgcggcagcagttgctgcgcctcatgcgcgttggccagtaccagcaccggcgccgatgccagcacttcgccgtcctgcccgagcgcctgccattgcccgtcgacgcgcgcgattgcagcaacccggcagccgaaacgtgccgtcaccgcagcgcccgcttgcgccagctgcgccgagcagatgtcaggcggcgccacccagccgccttgcgggaaccacaggccgccacgcggcacgccggcatggtgggccgctgccgcctcttcagcgctcatccagcgcacgaacccttccggcaagcgcatcgccgccagcgcggcgcgctgggcctcgccctcggcttcgtcctcgccgatctgcagcacgccgcagccatgccagccgaccgcatggccggcctcggccaactccgcccaggcacgcagcgcgtactggttgccggtgcgcgacagccgcgacagcaggctgtcgtcggcggacaaatgtgcgtgcatggccgccgcgcgatgcgccgaggtctgccgcgccggcccgtcgtggccatcgaacagtgtcacgcgccagccgcgcgcggccagccgttcggtcacggcgcagccggccaggccggcgccgatcacgatggcatggcgctcggcccattgggccggcagtggcggcgcatggcggcgcgctttccattgcgggcggaagctcgcgacggtcatttgccacttgccgccaaagccgggcgccctgctgacttcgaaaccgacctccttgagcccgcgccgcacaaagcccgcggccgcccacgtggccagcctggcgcctggccgggccagccgcgccaggccgcggaacacttgcggcgaccacatctccgtattgcgcgccggcgcgaaaccgtccaggtaaaaggcatccgcgccggccgccagccgcggcagcatctgctcgatatcgcccagtgccagcgtcagcaccacgcgcccgccgtcgaaggccaggcggtgcaggcccggcagcgccagcggccattgcgcctgcagcgcctgcgccagcggctgcagcccgtccagcccggcgtgcaactgcgccagcccttcgcgggtgaacgggtgcttttcgatcgagacgaaatgcagcgtgccgcagcgctggggatcagcgcgccacgcctgccaggtagccaggaaattcagccccaggccgaagccggtctcgacgatgacgaactggcgctgaccggcccacgcctgcggcaggccgttgccacccaggaagacatgggcggcctgcgccagcccgccttcggtgctgtggtagacgtcgtcgtagcggggcgaatacgggatgccttcggcagaaaggatcggctcggcgggctctagtgcgcgcggcatgggacaggaaattcggcgaaaagcaaaatgcccgggcggattcgccggggcgtgggagcgggcttggtaattcgcgccggatggtagcatagcggccttcccgcagaccgcatcgccctgccccttgatttgcgccgtccaggcgccccgctccacatgctcagctaccgtcacgccttccacgccggcaaccatgccgatgtcctcaaacacgccgtcgtggtgcaactgcttgagcacctggcgcagaaggacaaggcgttctggtatatcgacacccatgccggtgccggcctttacgcgctggatcacgcctacgcgcagaagaaggccgaattcgaaaccgggatcgcaccgctgtggcgtgccgccgccagcggcacccagctgccggcgatgctggacgaatacctggaccaggtgcgcgcgctcaacccggacggcaacctgcgccactaccccggctcgccctggctggcctggcagatgctgcgcgagcacgaccggctgcggctgttcgagctgcacagcaccgagatccaggtgctgcgcgacaacttccgcggcgccgggcgccgcgtcatgctgtacgacggcgacggcttcggcggcatcaaggccatcctgcctccgccgccgcgccgcgcgctggtgctggtcgacccgtcctacgaggacaagcaggactacgcccgcaccgtgcagaccatccgcgacgggctggagcgttttgccaccggcgtctatgcggtctggtacccgcaggtgcagcggcgcgaatcggcgcagctgtcggtgcagctcaagggcctgccgctcaaaagctggctgcacgtgaccctgaccgtcaggcatccggtcgagggcggcctgggcctgcatggcagcggcatgttcatcgtcaatccgccgtggcggctgaaggaatcgctgcagcaggccatgccggtgctgaccgacctgctcggccaggacgatggcgcaaggttcacgctcgaagccgaggagaactgaggcggcgcaccagccagtccagcgccatgcccgcggccaggccgacgctgtcggccagcaggtcgagccagtcggcctcgcggtagccggtctgcccctgcagcagttcgatcagcgcgccgtacgccaccagccccagcaagacggcccagccacggccgctgtaggcgcgccggcccagcacgcccagcaccgcgaacgccagcatatggttggccttgtcccagccggtggtcggcaggggctgcgtcggcggcatcagcgacagcgccagcaccgcggccgcgcagccccagaacagcaggcgccagcgcagcggggtcagggtcgggacggcaatcatcggcatgtgtgcgtcatctggaaagccgacaatatatccctgccgcctgccgcaggcaccggagcccccggcggggctggattccccccgcgccttgcgctacaatccgcagcctcgttgcactacaggcgcaagccatgccgacaccacggttcggcggccagagccggcagagcggacagaagaaaggcgggcagttccagccgccttttttgctttcctgtccggcgcaagccagcgagcatcgcggccgcccgcccgggcagcgccgcaaggaccgcgagggtggcgaaattggtagacgcaccaggtttaggtcctgacgccagcaatggtgtaggggttcgagtcccctccctcgcaccacccgcccttctagtggcgggctgacaacttccgtttcccaatccccttcggcacgctttttccggcaggcacccccgcgccgcggcactttccagcctgcgccagtgacggtatcatttcgccatcgtatcgataatcgatatatatgtatattggtgcaatactcactcatcgtggtgcagccatcccgtggatggtgccgcccggtcccttcgcccgcgacgcaactatgccgtcaaaacccgtcccgccacccgcgcccgaccgcgacaacccgctgttcaaccagtcgctcgaaaaaggcctcgaagtcctgcgcgccttcaacggcgtccaccgtacgctgaccctgtcggaactggccgcgctgaccggcatgaacaagagctcggcgcagcgcaccatccataccctggaagcgctgggctatgtcgacaagcacccgcagacgcggcgcttccggttgacgccgcgggtgatggagatcggctacaactatctggcggccgatgcgctgatcccggtggccagcccctacctgtcgcagctggccgcggccagcggcgagaccgccaacctgaccgagccggtcgggctggacatggtctacgtggcccagctgatgaccgccaagcacatgccggtgctgacgccggtgggcatgcgcatcccgatgtattgcaccagctccggccgggcctacctcagcacgctgcccgacgagcaggtcctggcgatgctggagcagtcggcacgcgtggcgcgcacgcccgcgacgctgaccggcgtggatgcgatcttcgagcgcgtggcggcgtgccgccggctgggctacgccagcaatgaagaggaactgttcatcggcgacatgggcctggccgcgcccatcgtcaacagccagggcgttgcggtcggcgcggtgcacgtgtcgccgccggccagccgctggagcatggccgaggcgcagaaaaagctggcgccactggtgatggaatgcgcgcgggcgatctcgcattcgatcgcacactgaggcccggcacggcgaaggccggccaactcgcgcaggggtggtagaacacctgagtgccagtgcctttcgcggacccttgccgcgatctatgctgaaggtgtcggagcggcaccgagccgttccggcatcttcacctcagccctgatcggagggcatatgaaattccctgccttgctgttggcagcgtcgatggccgctggctggtcatcgctcgcctatgctgccggatgccagtacgacatgcagtgcaaaggagagcggatctgccagcaagggcagtgcgtctttcctgacgcggaagaaaccgcggaagccggtgggccggcgccgctgccggcgaccaagcgcacgccagcgccgccgccagcccgcgggtgctgcaccgtggcaggcaagctcaagctgtcaccggccgcggcctcggataccagcctggcgagcggcgatgcgtgccaggggctgaccgcctcgggcaagccggttcccggcacgatctgcaactagcctctggatctggcgcgggcgcctagcgcgcgtgcgccagcatggcctgcagcagcacgttggcgcccgcctcgacatgctcgggcagcgcgtcttccagctcgttatggctgatgccgtccttgcacggcacgaagatcatgccggtgggcgcgcgccgcgcgacgtagaccgcgtcgtggccggcgccgctgaccacgtccatatgcggcaggcccagcgccgtggccgcgcgccgcacgctgtcaacgcattcgggcgcgaacacgcacggctcgaacttcaccacctggcggatctcgacctccacgccggcggccacagcaatgccttcgaatgccgcctgcatggccgcgtgcatgcggtccagcccggcctgcgacaggttgcggaagtcgaccgagaaatcgacccggcccggaatcacgttgcgcgagttcggcgtgacctgcagatagccgaccgtgccgcgcccgtgcggcgcctcgtcgcgcgcgatccggttgaccgcctcgaccatgcgcgcggccgccagcatcgcgtcgtggcgcagcgccagcggcgtcgggccggcgtgcgcgtccatgccggtcacggtcacgtcgtaccactgctggcccagcgcgcccgagaccacgccgatcggcaggccggccgcctccagcaccggcccctgctcgatatgcgcctcgaagtaggccgcgaacatgccgcccggcaccgcgcccgccggctgcgcgccgcggtagccgatcgccgccagcgcgtcgcccacgctgacgccatccacatcggtctgggcgcgcgcaaaagccgcgtcgaactctccggcaaatacgcccgagcccatcatcaccggcgtgaagcgcgtgccctcctcgttggtccagaacgcgacctccagcggcgcgcgcgtgacgatgcccaggtcgtcgagcgtgcgcatgacttccaggccggccagcacgccgaagttgccgtcgaacttgccgcccgagggctgggtgtcgatatggctgccggtggccacggcgcgcgcgtcggggtcgctgccggcgcggcgcgcgaagacgttgccgatctcgtcgacgcgcacgtcgagcccggcctcgcggcaccactgcaccaccaggtcgcgccccttgcggtcggcttcggtcagcgcgatgcggcacacgccgcccctgggcgtggcgccgatcgcggcgaggtccatcagcgattgccacaggcgggcgccattgatgcggggaaggtgtagctggtccatgtctggttgcgggtggggtgagggagaggaaacggcagcaggttcagcaagaagcagaccaccgtagccggcacttcggcccgcattcccggccctgccaccgtggcacatgacttgctttgcagacatccgtcccctcaagccaacccaggagcaagcctgtgcaccacgatccctcccttctcgcgaaaggtctcaagtcagctgcctcggtcatgagcgccgccgtgctgtcgctgctcgcgctgcccggtgccgcccatgccgacaaggtgctgcgcatcggcatgaccgccgccgacatcccgcgcacgctcggccagcccgaccagggcttcgagggcaaccgcttctccggcatcccgatgtacgacggcctcacccaatgggacctgtcccggggcaacggccccagcctgctgatcccgggcctggccaccgaatggaaggtcgacgccgccgacaagaccagatgggtgttcaagctgcgccccggcgtcaagttccacgacggcaccccgttcaacgccgatgccgtggtctggaacgtcggcaaagtgctggacaagaccgccaggcagttcgatcccagccaggtcggcgtgaccgcctcgcgcatgccgacgctgcgcacggccaagaagatcgacgacttcaccgtggagctggtcacctccgagccggattcgttcctgccctacaacctgaccaacctgttcatggcctcgcccacgcagtgggagaagaaattcgctgcggtgccggcctcggtcaccgatccggtcgagcgctccaagcaggcctgggtcgcgtttgccgccgatgccgccggcaccgggccgttcaggatgagccgcttcgtgccgcgcgagcgcctggaagtggtgcgcaatgcgcaatactgggacacgaagcgcgtgccaaagatcgacaaggtggtgatggtgccgatgcccgaggccaacgcgcgcaccgccgcgctgctgtcgggccaggtcgactggatcgaagccccggcacccgacgccatcgcccagatcaagagccgcggcttccaggtctatgccaatgcgcagccgcatatgtggccgtggcagctgtcgttcgcgcccggctcgccatggctggacaagcgcgtgcgccaggccgccaacctgtgcgtcaaccgcagcgggctgaagacgctgctgggcggctacatggccgaggccaagggcatcgtcgaagccggcaacccgtggtggggcaatcccaagttcgatatcaagtacgacccggccgctgccaaaaagctgatgcaggaggccggctactccgccgccaaaccggtcaaggtgaaggtgcaggtgtcggcgtcgggttccggccagatgcagccgctgccgatgaacgaatacgtgcagcagaacctgaaggagtgctttatcgacgtcgacttcgacgtggtcgagtggaacaccctcttcaccaactggcgcgtcggcgccaaggacgccagcgcgcacggcgccaatgccatcaacgtcagctttgcggcaatggacccgttcttcgccatggtgcgctttgtcagcaccaagacccagccgccggtctcgaacaactggggctacttcggcaatgccgagttcgacaagctgatcgagaacgcgcgcacctcgtttgacgagaaatcgcgcgacgcggcgctggccaggctgcatgcccgcatcgtcgaggagtcgccgttcgtgctgatcgcgcacgacgtcggcccgcgcgcgatttcgaagaaggtcaagggcgtggtgcagccgcagagctggtttatcgatatcgcgacgatgtcgatggactgatcccggccgcgcccgacggacgccgcgcggcagccccgccgccgcgcggcccggcaatcccgcccggtcttccccgcgtgccgcgcacggcgcacgcacgccccaacttgccggatcctcccatgcaatacctgttccgccgcatcctctatgccatccccatcctgctcggggtggcgctgctgtgcttctcgctggtccatatcgcccccggcgatccgctggtgtcggtgctgccgcccgacgcctcggaagagctgcgccgccagctgaccgcactctatggcttcgacaagcccttcctggagcaattcgtgcactggctgggccgcgcgctgcaaggcgacctgggcacgtccatcgccaccagccgcccggtgatggccgaagtcggcgccgccgtggtcaattccctgcgcctggccaccgtggccacgctgatcggcttcagcttcggctgcctgttcggctttgtcgccggctacctgcgcgactccgtggccgaccgcaccgcttcgctgctgtcggtgctgggcgtcagcatcccgcactactggctcggcatggtgctggtgatcgcattctcggtgctgctgggctggctgccggctaccggcgccgggccgggcggttcgggcgactgggcatgggactgggagcacatgcagtacatgctgctgccggcggtgaccatgtcggtgatcccgatgggcatcgtggcacgcacggtgcgcgcgctggtggccgagatcctggccaacgagttcatcgtcggcctgcgcgcgcgcggcctgtccgacctggcagtgttccgccatgtgctcaagaacgtggcgccgaccgcgctgtcggtgatgggcctgcagctgggctacctgctgggcggctcgatcctgatcgagaccgtgttctcgtggcccggcaccggcttcctgctcaactccgccatcttccagcgcgacttcccgctgctgcaggggaccatcctggtgctggcggtgttcttcgtgctgctcaacctgctggtcgatgcgctgcagacgctgttcgacccgcgcatccagcgcaactgaggagaccgccatggacatgactgtcgatcaatcaccggccgccgccgcggtgcagcgctcgcccggctactggaccacggtgggccggcgcctgctgcgcaaccggctggccatgctggccgcgctggtgctgctggggctggtgctgatggcgctgttcgccccggtgctgatgccggcggacccgtacgcggcatcgatcctcaagcgcctcaagccgatcggcaccgagcacttcccgctcggcaccgacgagctgggacgcgacatgctgtcgcggctgatgctgggcgcgcggctgtcgctgttcatgggcatcacgccggtgctgctggcctttgtcatcggcagcgcactcggcatcgtcgcaggctatgccggcggctggaccaacaccgtgatcatgcggctcaccgacatcctgtacgccttcccgtcggtgctgctggcgatcgcgctgtcgggcacgctgggcgcgggcgtgggcaatgcgctgctgtcgctgaccatcgtctttatcccgcagatcgtgcgcgtggccgagagcgtgaccacccaggtgcgcaaccgcgagtttgtcgatgcggcgcgtgcttccggggcatcgtcgctgaccatcgtgcgcgcccatgtgctcaacaacgtgcttggaccgatcttcgtctatgccaccagcctgatctcggtgtcgatgatcctggcctccgggctgtccttcctgggcctgggcgtcaagccgccggagccggagtggggcctgatgctcaacacgctgcgcacggccatctacacccagccgtgggttgccgccctgcccggcgccatgatcttcctgacctcggtctcgttcaacctgctggccgacggcatccgctcggccatggaaatcaaggactgaaccatgccagcactgatgcaggccccttcgccacaggccggccgcgatgtcggcggcccggcgcagccgctggtgatcgcccaccagctggtcaagcactttcccatcaagtccggcctgcccggcctgcgcgcgcgcgccgcgtccgtgcgcgcggtcgatggcgtcagcttcgacgtgctcaagggcgagaccctgggcgtggtcggcgagtccggctgcggcaagtccaccaccgcgcggctgctgatgcagctgacgcagcaggaccgcggcgagctgatcttcgacgcgcagggcgtgggctcggcccagctgccgatgaagcagttccgcagccaggtgcagatggtgttccaggacagctattcgtcgctgaacccgcgcctgaccatcgaggagtcgatcgctttcacgccacgcgtccatggcgtgccggcgcgcgaagccaccgagcgcgcccgctacctgctgcagcgcgtcgggctcgatccggcacgctttgccgggcgctacccgcacgagctgtcgggcgggcagcgccagcgcgtcaacattgcccgcgcgctggcgctgcgcccgcggctggtgatcctggacgaggcggtctcggcactggacaagtcggtggaggcgcaggtgctgaacctgctgctggacctgaaggccgagttcgacctgacctacgtcttcatcagccacgacctcaacgtgatccgctacctgtgcgaccgcgtgatggtgatgtacctgggcaaggtggtggagatcgcggataccgagaccctttatcggcacccggcgcacccgtacacgcgcgcgctgctggcgtcgatgccgtcgatggaccccgaccgccgcaccgcggtcgcgccgctggcgggcgacccgcccaacccgatcaacccgccgtccggctgcagcttccatccgcgctgcgccatggcgcaggacgtgtgcgcgcggcgcgagccgcagctgaccgacctggtggccgggcatccggtcgcctgcctgctggccgccgcaccctgaggagcccaccatgtccaccaacccgcaaggcacacccggcgcgccgatgatctcggtgcgggacctgcacgtcaccttctccggcggcggcaagaccatccgcgccgtcaacggcgtttcgctcgacgtgggcgccggcgaggccgtggccctgatcggcgaatccggctccggcaagagcgtcacgctgcgcgcgctgatgcgtctgcacccgccgcgccgcacccgcatggcaggccagatccgcgtcgacggcgccgaggtgatggcgctcgaccagcgcgcgctggcccggctgcgcggcggcaccatggcgatggtgttccaggagccgctgctggcgctggacccggtctacaccgtgggccagcagatcgtcgaatgcatccgcacccacgacaaggtctcggccgccgaggcgcgctcgcgcgcgctgcaggcgctcgagtccgtgcgcattcccagcccggagcggcggatggcagcgtatccgcacgagttgtcgggcggcatgcgccagcgcgcgatgatcgcgctggcactgtcggcgcggcccaggatcctgctggccgacgagcctaccaccgcgctggacgccaccgtgcagatccaggtgctgatcctgctgcgcgagctgcagcgcgaactggggctgtccatcgtcttcgtcacccacgatatcggcgccgcggtggagatcgccgaccgcgtcgcggtgatgtacggcgggcgcattgtcgaagaaggcccgatccgcaccctgctgcgcgcggcgcgccacccctacaccatcgccctgctgcagagccgccagcatggcatggaccgcggccagcggctgcaggccatcggcggcgccccgcccgacctggccgcgctgccgccaggctgcacctttgcaccgcgctgcccgcatgcgcgcccgcaatgcctggccgaggtgccgcaggcggtcaccgtcggcaccgggcaccgcgtcagttgcgtgctggccgccgagcccgcggtcgccaccgcggcatgacccccatcccagaaccccaacgtattccaggccacccatgacgcttgccacccatcctgcccgtgccttcatgccgtacccacagatcgccgtcccgcacgccgccagcggcccgctgcggggcctgagctttgccgtgaaggacctgttcgacgtagctggctatccgaccggcggcggcaatccgcacgtgctggcgcgctcgggcatcaaggccgcgaccgcaccggcggtgcagcggctgctggacgccggcgccgccttcgtcggcaagacccacactgacgagctggccttctccatgaacggccagaacgcccactacgggcgcccggtcaacggcgcggcaccggagcgcatcaccggcggctcgtcgtcgggctcggcctcggcggtatcgaacggcttgtgcgactttgcgctgggctccgacaccggcggctcggtgcgcgcgccggccagccattgcggcctgttcggcatccggcccacgcatgggcgcatttcgctggaacgctgcctgccgctgtccgaaagcctggacacctgcggcttctttgcgcgcgacatcggcaccttcgcgcgcgtggccgaggtgctgttcggcgcggacccggcgccgctgccggccgcgccgcggctgctgtttgccaccgacctgttcgcccagccgaccccggaggcccgcgacgcgctggcgccggctgtcgcccggatcgaaaccgcgctgggccgggccgcgcctgccaccgtggccgaccggccgctgtccgacctgtggtgggcgttccgctacgtgcagggctgggaggcgtggcgcagcgacggcgaactgatcgagcaacacgggctggagctgggtgccgatgtcgcggcacgcttcgccttctcgaaggccgtcacccgcagccagttcgacgaagccagtgccgtacgccgcgacttcaccgcgcacctgggccgcctgctggggccggacggcgtgctggtgctgccgaccatgcccgatatcgcgccgctgcgcgccgaaccgatcgagtccctggagacctaccgcaacctcgccgcccagacgttgtgcctgacgccgctgagcggcttcccgcagctgaacctgccgctggccggccgcgacggcgcaccgctcggcatctcgctgctggggccggcgggcagtgaccgcagcctggtggcactggcggagcggatcatggcgcacaaggcgtgaaccagtaaggcaaggggcacgcggcatgccgacggcgaggtcgatgccggcatcgtttcgccaggaccggcccgcggcttccgcgaagccacagcctgaaccgcgccgcacctcaactcgccagcgccgacaccccgttccccggccgcttgacgcggaaccacgccgcatacagcgccggcaggaacagcagcgtcagcaccgtggcaatgatcagcccgcccatgatcgccaccgccatcggcccccagaacatcgagcgcgacagcgggatcatcgccagcaccgccgcggcggcggtcaggatgatcgggcggaagcggcgcaccgcggcctcgacgatggcggtccactgcggcacgccggcgctgatgtcctgctcgatctggtcgaccaggatcaccgagttgcggatgatcatgcccagcagcgcggtgatgcccagctgcgccacaaaccccatcggcgcgcgcagcagcaacagcgtggcggcggcgccgatcaggcccagcgggccggtcaggaacaccatggtcgcgcgcgagaagctgtgcagctgcagcatcagcagcgtgaagatgatgaagatgcacagcggcaactgcgccgcgatggaggcgcccgccttgccgctctcttcctccgcgccggccacggtgatgcggtagcccggcggcagctgcgcgcgcagctggtccagcttcgggttgatctgcgcggtcaccgtcgggccctggatgccgtcgaccacatcggcctgcacggtcacgccgaagtcgcggttctcgcgccacaccacgcccggctccgagcgcagcgtcacgcgcgccacctgcgtcagcggcaccatgcgcccggtgttggtcggcaccagcatgttgttcaggtccgagatcgcatcgcgctcattgcgcggggtgcgcatcaggatgtcgatcagcttgtcgccgtcgcggtactggcccaccggcacgccgctgagcacggtctgcgtgacgcgggcgatggcattggtggtcacgcccagtgcgcgcgccttgtcctggtcgatctccaggcgcagcatcttgacgttctcattccagttgtcgttgaccccgacggtattggggttggcgcgcatctcggccttgacctggtcggccagctggcgtaccccggctgcgtccggcccgatcacgcggaactgcacaggataggccaccggaggcccgttgggcaacagcttgacgcggcctcgcaggtacgggaattcggcatccatcagcttgatgatgcggcggcgcagcgcatcgcgcacctcggtgctgaccggcatcacgatcacctgcgccacattggtctgcgggaagatctggtccagcggcaggtagaagcgcggcgcgccggtgccgacgaaggtggtcaggctctcgacttccttgtccttgccgaccagctgctcgaagcgcttggcctcggtttccatctgggcgaagctggtgccctcgggcatccacagctccaccatcagctcggggcggctggaatccgggaagaactgcttctcgacaaacttgaaggcgtagatgcccagcccgaaggccaccagcgtgatcgcgatcaccaccttgcgccagctcacgcaccagtccaccagccggcggaagcgcgcatagaacggcgtgtcgaagacctcgtgggcctcgcccgcgccggggccgcgggtcttgagcagcaggtagcccaggtagggcgtgaaatagaccgcggccagccacgacagcaccagcgccagcgccgtcaccgcaaagatcgcgaaggtgtattcgcccaccgtcgagcgcgccaggcccaccggcaggaagccggccgcggtgatcagcgtgccggtcagcatcggcatcgcggtggaggtataggcgaaggtggccgcctccatcttggaaaagccctcttccagcttgcgcaccatcatctcgaccgcaatgatggcgtcgtccaccagcagcccaagcgccacgatcagcgcgccgagcgatatcttgtgcagcccgatgccgaagatattcatgaacaggaaggtcaccgccagcaccagcgggatcgtcagcgccaccaccaggcccgggcgcgcgtccagccgcagcggtttggtgtgcagccccagcgagacgaaactgaccgccagcacgatcaccaccgcctcgatcagcacgtgcacgaactcgcccaccgaacgctggaccgccttcggctggtcctgcacctggtccatctcgattcccaccggcaactgcgtgcgcagccggtcgaacgcggcgcgcaggttcttgcccagttcgatgatgtcgccgcccttctgcatcgaaatgcccagcccgatcacgtccttgccgttgaagcgcatgcgcgtctgggtcgggtcgacatagccgcggtagacgtgcgcgatgtcgcccaggcggatattggcgatgccgttgggcccgcgcagcaccaggttctccaggtcctccacgctggcgaactggccggacaggcgcacctgcaggttgtcggtcggggtgaccagcacgccgctgccggtcaggttgttctgctgcgagatctggtcggcgatggcgttgatatccagccccagctgggcgaagcgcgcctggttgaactcgatgaagaccttctcgtcctgcaggccgatcagcgacaccttggccaccgacggcacgcgcagcagttcctggcgcaccaggtcggcgtactcgcgcagctccttgtagttgaagccgtcggccgagagcgcgtagatggtgccgtacacgtcgccaaactcatcattgaagaacggcccgcgcacgcccgcgggcagcgtctgctggatatcgccgatcttcttgcgcgcggtgtaccagacctgcgcggtctcctttgccggcgaggtgtccttgagctggaagatcaccgtggtctcgcccggcttggagaagctgcggatcttgtccgcatagggcacttcctgcagctggcgctcgatcttgtccgtcacctggacggcgatctgctcggcggtggcgccgggccagaaggcctgcaccaccatcacgcggaaggtaaagggcggatcctcgtcctggcccagctggaagaatgccagcatgccgccaagcagcagcaccaccagcaggtagcgggtcagcggctggtgctcgagtgcccagcgcgacaggttgaagcgggaatgatccatccgctcacccctgtttcggggtggcggccggtgccgatgccggggccgatgcaggccctcccgcaggcgcaaccgtctgcagcgggcgcaccttctggcccgcgcgcaacaggtgcaccccggcggtgacgatggtctggcccggggccaggccctggcgcacctccacctcgttgccgatggcctcgcccagcgtcaccggcaccggcttgaccgtgccggcggcggcgtcatagatccagacctggttgcggccctgctcctgcagcagcgcggtcagcggcacccggatggccgcggtggcgccgctgcgcatgaaggtcaccaccgcggtcatgccgagcttgaggtcggcgggcgggttcggcaccgtcacgcgggtggcataggtgcgggtgaccgggtcggccgccgcggcaatctcgcgcacgcggccaggcagcgtgcgctgcggctcggcccaggtatggatggtcacgtcggtaatgccgcgcagcaggtcgacctggtcttcgggcaggccgatcgcgacttccttctctgccgtctgcgccacgcgcaccaccggctggccgggcgtcaccacctggcccacctcggcatcgatcgccgtgaccacgccgtcggcatcggcatgcaggaccgagtagccggtctggttggactggctgcgcagcccggcctgggcctggcgcagccgcgattcggcggcgtcatagttggcctggcgccggtgctgctcggcagcgctgatgaagcccttggcgaacaggtcgttgtagcgcttcaggtcggcggcggccaggtcgcggtcagtcttcgcggcctcgaactgggcgcgtgagccggcctcggccagcgacaggtcggtgggatccaggcgcgccagcggctggcccttgctgaccaccgcgcccacatccaccagcctggcggcgatcttgcccccgacgcggaagcccagccgcgactccacgcgcgggcgcacgtcgccggagaactcgaaggcggtcttgccgttgtgcgggctcagctgcatcaggcgcaccgggcgcacctccggcgccggctcggccttcttgccgcagccggtcagggccagcaggctggccatcaaaagtgcggctacggtcacgcctcgaccgaggtggcgcggcggcatcgtaacaacaggagaatctgcagccgcaacttccggcacttggcaaagcactggcatcggtaggcaacgagtcggatggaacaactgacaagactggccggtgaccgcaaatcccctgcgcccgggaagtcgtcggggcgcgcggaatggccgcgcgcagccggcatcggcaataaataactttccggtcagtaatataacgacgacccccgggtgcgtcaaacggcaggcgacgaaaccgctggaatgaagactcagttgccgttccgggctggtgaactgcgccgacaggcttcggcatgcgcgaccataccctgcccggcgcgatgctacaatccgccgcgccgctggcgcttccccccacatcttcgacccgagaccggcgtgacgcccgatcagtattgccaagagaaagtcgcccagagcggctcgagcttctattacagcttcctgttcctgccggccgagcgccgccgcgccatcaccgcgctgtacgcctggtgccgcgaagtcgacgacgtggtcgacgacagccatgacgcaggcctggcccaccagcagctggactggtggcgcgccgaactgcgccgcctgttcgagggcgagccgacccacccgaccaccaaggccctgcagccgcatgtgcgcagcgccggcctgccccagggcgagatgtccgaagtgctggaaggcatggaaatggacctgacccagacccgctacctggacgagcccgggctggcccgctactgccattgcgtggccggcgtggtcggcacgctcagcgcgcggctgttcggctataccgacccgcagacgctggtgtttgccgagaggcttggccagtcgctgcaactggtcaatatcctgcgcgacgtcggcgaggacgcgcggcgcgggcgcatctacctgccggtcaataccctgcagcagttccaggtgcctgcatccgagatcctgaagggtcagcattccgagcgctttgtcgcgctgatgcagtaccacgccggccgtgcccgcgcgctgtaccatgaggcactggcgctgctgccgaagcaggaccgccgcgcccagcgtgccggcctgctgatgggcgcgatctaccacgcgctgctcgacgaactggaagccagccagttccaggtgctgaaccagcgcatcgcgctgaccccgctgcgcaagctgtggattgcctggaagacctgggtgtgcaacagctagcgtcctgctctcttttctgtccgacccgccaagccgtaccgccatgacgcagacatccgcctccctcggcgacaccatccttgcccacgccgaccagctcgccagtttctccgacatggaaggcggcctcacctgcgcctacctgaccccggcccaccgcgccgcgcaggcccggcttgcgcagtggatggaggcggccggcatgcaggtgcggatcgacgccatcggcaacgtcatcggccgctatgcggccgacccggccgtgcccgacgcgcgcgtgctgatgaccggctcgcacttcgacaccgtgcgcaatggcgggcgctatgacggacggcttggcatcgtgctgccgatcgccgtggtcggcgcgctcaaccaggccggcatccgcctgccctatcactttgaagtggtggggttcgccgaagaggaaggcctgcgcttcaagaccagcttcctggccagcagcgtgttggcgggccgcttcgatcccaccctgctggagcgccaggacgcggacggcatcacgctgcgcgaggcgctggcggcatcggacctgcccggcgcgggcgatctgcaggccctgcgcgccgccgcggtcgatccggcgtcgctgctgggctttgtcgaagtgcatatcgagcagggcccggtgctgctgcaccacggcctgccgctgggcgtggtcacccagatcgcgggcagcagccgctttgcggtgcgggtcgaaggcctggccagccacgccggcaccacgccgatgggcatgcgccgcgacgccgccgcgggcgcggcggagatgatcctgctggtggagcagcgctgcacggcggcgccgacgctggtcggtacggtgggtcagctgcaggtgcccaacgggtcgagcaatgtcatcccggcggcctgcaccttctcgatggatattcgcgccggcgaggatagcatccgcgaggccgccatcgccgacatcgtggccggcatcggccagatcgcggaacggcgcgggctggccgcccaggtggagcgcgtgccgccggtcaacaacgcgccgtgcgcgcgctggctgatggaccagttcggggcggtgctgaagaagcgcgggctgcaggccttcgagctgccctccggcgccggccacgacgccatgatgatgcagcgcatcaccgacgtggccatgctgttcgtgcgttgcggcaacggcggcatcagccacaacccgctggaaaccatcacggcggaggatgcccagctggcggcggaggtcttcgtggatttcctgcggcacttccagccgcgcggctaagcgccacagtggcgtaccatggagggcgcggcacgataagaacggatcagccgccctggtagatatcgcgcccgaagtcgtaaaggttcttgcgcagcttgcggcgctcgtccggcgacaggcgcgagccgccgcgttcgtcaccgcgccggcgctcggcgtcgcgctgctcggcgcgatggcgctcggcacgggcccgcgcctcgcgctggctgttgccgggatcgctggcctgggtcgacgggtggcgcttgagcaggttggccatgccggccgattgcgcctgcaccgtcccggccggaatgcacagcgccagcacggccagcgccagcgcaaggcaggcgccggcgataccatgctgcggatgcccgtgccgggttcggttcactttcattgataatggcgatctttggcttcgggaaaaagcagtctttggacagactggacggactgccctgaagccgggaattccggtaccccgtccggcgccgcaccctctgcaagcatcgcgccagcgcgggcgaggcaggctgggcgaggcagtggctcgtctggtgcaaatgcgtggaaatctgccgcgcatggcgcccaaaaagacggattgcgcagtgtaatcgcacgattggtgcacactgccataccacggggtaaagtatgtaacgttttgttaagccattttgagcgaaagcgatagtcgctaagataccgccatggaaaataccagccacaagattcttgtcgtcgacgatgacccgcgtctgcgcgatttgctgcgccgctatctgggcgaacagggtttcaccgtgttggtggcggaaaacgccaccgcgatgaacaagctctggctgcgcgagcgtttcgacctgctggtgctggacctgatgatgccgggtgaagacggcctgtcgatctgccgccggctgcgcggggccaatgaccagaccccgatcatcatgctcaccgccaagggcgaggacgtggaccgcatcgtcggcctggagatgggcgccgacgactacctgcccaaacccttcaacccgcgcgaactgattgcgcgcatccacgcggtgctgcgccgcaagggcccggccgaagtgcccggcgccccgtcggaaacgcccgagaccttcgccttcggcgacttcgtgctgaacctggccacgcgcacgctgaccaagaacgacgaggaaatcacgctgaccaccggcgagttctcggtcctcaaggtgttcgcccgccatccgcgccagccgctgtcgcgcgagaagctgatggaaatggcgcgcggccgtgaatatgaagtcttcgaccgcagcctggacgtgcagatctcgcgcctgcgcaagctgatcgagccggacccgagcaacccccgttttatccagacggtgtggggcctgggctacgtcttcatccccgatggcgtgaagtaaccgattacggccgctgttcccatcgtggcgaccgttatcggcagaaccgcaacgcggttctttggttcgctgttctggcgaaccttcatgcttatcgccctgctgctggcgatttcgctgggcatctggttccagagctaccggctgttcgaacgcgccccgcgcgcgcagcagatcgccatgcaggtggtcagcgtggtcaagctcacgcgcgccgcgctgctctattccgaccccgcgcggcggcgcttcctgctgctcgacctggtgcagaacgaaggcatcaaggtctatccgcgcgagaaggacgacgacttcgccgcgcccaccgccaacccgttcctgaccaccctggtgcagcaggagatccgcagccgcctgggcgaggacacggtgctggccaccaccgtcaacgacattcccggcgtgtgggtcagcttcgagatcgagggcgacgactactgggtggcgatcagccccgagcgcttcgagcgcgtgcccggcatccagtggctgtggtggagtattgccgcgctgctgctgtcgatcatcggcgcggcctttatcaccgcgcgcgtcaactacccgctcaagcggctggccaacgccgcccgcgcgatcggcgccggcggcgacccgccgccgctgcccgagcacggcgccagtgaggtggcgctggccaaccacagcttcaatcagatggtgcgcgacctgcgccagctcgacgacgaccgcgtggtgatgctggccggcatctcgcacgacctgcgcacgccgctgacgcgcctgcgcctggaaaccgagatgtcgccgatggacacccccacgcgcgacgccatgatcgccgacatcgagcagatggacgctatcatcggacagttcctcaactacgcgcgcccgccgctggaaaccgtggaaccggttgacctgtcggcgctggtgcacgatgccgtgggcgtctacgccgcgcacgacgacgtgcgcgtgcacgtgcgcgccaatgagccggtgatggccgtggccaaccgcatggaagtgcagcgcatcctggacaacctggtcgagaacgcgcgccgctatgccaaggacgagcaaagcggcatggccgtggtcgagatctcgacgcgcgtggacgacaaggaagccgtgctgaccgtggccgaccacggcaacggcgtgcccgacggccagctgtcgctgctgacgcggcccttctaccggctcgacgccgcgcgcagcgaggccaagggcgccgggctgggcatgtccatcgtcaaccgcatcatgcagcgcaacggcggccggctgctgctggccaaccgccccgccccggccacggggctggtggtcagcgcctgcttccggcgcgcctgagcgtcagctgagcgcggcctgagcgccatccgcggcgcattgacaggttttcgacagcatttgatagccttctgaaaggcattcgtcagggcaatgacagggtcgcggcgcacactggcgcccgtcatcaggcgcgcggcgaaatccttcccacacggcgtgacccgcgcacgcctggctgacttctccgaaccatcatgccgccgggaccgccggcggtgcctgagagacagccatgtcagatacctccgcagctacccccgccgggcagcacgggttccgcaccgtgttccgcgtcgtcagcggcaacttcctggaaatgtatgacttcatggtgtacggcttctacgcggccgccatcgccaggaccttctttcccagcggcaacgagttcgcctcgctgatgctttcgctcgccacctttggagcgggcttcctgatgcggccgctgggtgcgatcgtgctgggcgcctacatcgaccgccatggccgccgcaagggcctgatcatgacgctggcgctgatggccatgggcacgttgctgattgcctgcgtgccgggctacgccaccattggcgtggccgcgccgctgctggtattggccgggcgcctgctgcagggcttctccgcgggtgttgagctgggcggcgtctcggtctacctgtcggaaatcgccaggcctggccgcaagggcttctatgtcgcgtggcaatcgggcagccagcaggtggcggtgatcttcgccggcctgctgggcgtgatcctgcacgccacgctggctccggcgcaaatggatgaatggggctggcgcattcccttcctggtgggctgcctgatcgtgccgttcctgttcctgatccgccgttcgctggaagagaccgaggccttcaaggcgcgcaagcaccgccccgccatcgacgagatctaccgctcgatgctggacaactggcgcatcatcctggccggctgcatgatggtggtgatgaccacggtgtcgttctacatgatcaccgcatacacgccgaccttcggcaagaccgtgctgaagctggacgacaccgacaacctgatcgtcaccatgtgcgtgggcctgtccaacttcatctggctgccgctgatgggcgcgctgtcggaccgcatcggacgcaagccactgctggtgttcttcaccgtggcaacgctgctgaccgcgtaccccgccgtgtcatggctggtggccgagccgtcgttctcgcggctgctgatggtggagctgtggctgtcgttcctgtacggcagttataacggcgccatggtggtggcgctgaccgagatcatgccgcccgcggtgcgcaccaccggcttctcgctggcctacagcctggccacggcgctgttcggcggcttcaccccggcaatctcgacctggctgatccacgccaccggcaacaaggcggcgccggggctgtggctgatgttcgccgcgctgtgcggactggttgccacgctggtgatcttccgggcgcaacgagtggagcccgtcatgcatccggcctgaacacggctggttgaactcgccgcaatcgtcaccaacttgccataagcgggcccagcgcgcatggcatacttgcccttccgcatcgaagccgcctggctgatgccgcggcttcccatgccgggattcgctccaggcgtcacatggcttgcctatcgggctctttgagaatatcaattagcccggcacctggtgatgacgcataatcacgttttgtcgcggtaagccgcgtagccggcccacgccagccgcgcggcagcagcaccgctctcattgcaaccgtatcaggagatagtctatgaagaccgttggtgacaagctcgaagccttccacgtcgtcggtgtcaagccgggtttcaacaatcacgaagagaacggccagtcggctttcgaagacatcaccgaaaagtcgttcgaaggcaagtggaagatcatctacttctacccgaaggacttcaccttcgtctgcccgaccgaaatcgttgccttcgccaagctgaacggcgacttcgccgaccgcgacgcgatcgtgctgggcggctcgaccgacaacgaattcgtcaagctggcatggcgccgcgaacacaaggacctgaacaagctgaaccagtggcagttcgccgacgtgaccggttcgctgatcgaccagctgggcgtgcgtgaccacgctgccggcgttgccctgcgcgcgaccttcatcgtcgacccggacaacgtgatccagcatgtgtcggtgaacaacctgaacgtgggccgcaacccggaagaagtcctgcgtatcctggacggcctgcaaacggacgagctgtgcccgtgcaaccgtgccgttggtggcgccacgctgtaatttgctatcagtcgccagacacaccttggcgattcgcggagggcgctgccctccgcatcaaaacccgcttgcgcgggttttttgggcccgtatcgataggagaaataaatggaattcatcagcacgattaagaatctcatccccgattacgccaaggacatccgcctgaacgtggacggcaccatcgcgcgctcttcgctggaaggcaacgatgcggtcggcgtggcactggcggcggcatttgcggcgcagagcaaggtgctggtggatgccatccgcaacgccggcgtgctgtcgcccgaggaaaccaacggcgcgcagaccgcggccgcgctgatgggcatgaacaacacctggtacccgtacgtcgaaatggccgacgatcccgacctggccagccagccggccggcctgcgcatgaacgcctatgccacccatggcggcgtggacaagcgccgtttcgagatgtacgcactggccgcctcgatcgtgggcaagtgccacttctgcgtgaagtcgcactaccagctgctgaagaatgaacagggcatgaccgcgcagcaactgcgcgatgtcggccgcattgccgccgtgatcgtggccgccgccaacgtgatcgccgcgtaataagccccgccacagcgcgcccccgcgccctccgcggcgccctgccacgggcgccgtagcacagcagccggcagcttcccatcaggagttgccggctgttcccatcctgcaaccgccccgcgccagggctgcacaggtgcggcgatcagcctacaatccaggcaggacacgcactttcaggctgccatgaccctgccttcgccgacttccccccgtttccactaccgcctcgcggcggtgcatgactggggcgacatcgccgccgtcacgcaacaagcctacgggcaatatgagctggccatcatggaagactgccgcgcgtcgttccagcgcggcatgcaggcagtgctggcgaccagccatccggatatggaatggtgggtggcggagaccgatcacggcatcatgggcgccgtgctgttctgccatccgggcgccacgctgccggcactggacggcagcaccatcaccctgacccagccggaagcccggctgctgtcggtcagcccgcaggcgcgcggcctgggcctgggccgcacgctgatgcagatctgcatccagcgcgcgcgcgatatcggcgcgtcaacgctggtggtgcgcaccatgccggaaatggcatcggccatccggctgtgccagcagatgggcttcaccaagcgcaccgaagccggtgcgcgcaccggcgcaatggcccgcctgatcgactatacctacgccatcccgccggaaaacgccacggcgccagacgcggcgcgcccctgatcagtcctgcgcgtcgcccaccgaggcgcgccagagcagcaccgcggcctgcgccacgatgccctcctggcgcccttcgaagcccagcttctcgttggtcttggccttgacgttgcaacgcccgcgcgcaatccccaggtcctccgccaggttcgccaccatcgccccgatatgcggcgccagcttgggcgcctgcgcgatcacggtggcatcgacattgccgatttcatagcccgcctcgcgcacgcggcgcgcggcctcgcgcagcagcacgcggctgtcggcgccggcgaactgcgcgtcggtgtcggggaaatggcggccgatatcgcccagcgcggccgcgccgaagagcgcgtcggtgaccgcgtgcagcagcgcatccgcatcggaatggcccagcaggccgcggtcgtgcggaatctcgaccccgcccaggatcagcttgcggccgggcaccagcgcgtggacgtcatagccctgtcccacccggatatcgaaaggcatcatgcggtcaggctcctttgccatcgttgcccagcagcacttcggccagtgcgaagtcctccgggtaggtcaccttgaaattgcgcagcgagccgttgaccagccgcggatgcagcccaagacgctcgatcgcgctggcctcgtcggtcaccaccgcgccggccgccatggcgtcctgcagcgcctggcgcagcacgcccaggcggaacatctgcggcgtctgcgcctgccacaggccctcgcgcggcaccgtggcgccgatacgggcgtcgtcctgggcgcgcttgagcgtgtctggcaccggcaccgccaggatgccgccgatggcggcgtccgggtcgtcgtcgccgtcgctttccaccgcgcgcaccagcgcatggatcattgccggggtcaggcccgggcgcgcggcatcgtgcaccagcacccagtcgctgtcggtcgcgcccagctgcgccaggtggtgcagcccggccagcaccgaggcatggcgggtctcgccgccgacaaaggcggtatcgaagcgcagcccggcaaaggcggccgcgccgaagcgcgattccagcggcatgtcgtcgggcgccagcaccagcgcggtggcgttgatggcgtcgcacgccgagaacgccgccagcgcgtaccagatcatcggccggccggccacggtctggtattgcttgggaacggcgccgccggcgcggctgccggtaccggcacagggaatcagggcaaagcggcgagcgggcacaggatcggcgttgagtgaaagaggcgcgggcgcctgctggccggcatggccagcgggacaaccggtgcgcattctataatacggcccttgcccgtcgccatgccgcgccattccgcattgacgcgtgcccggcaggcgccacgggccgttgaggtcccctgccccgacccccgcccgcaatgccggcggggtgtcgtcgttttgaacgccccgctgccgacatgcctgacgccaagcccgccttcccctttgtcaacctgccgctggtcaagccggggctgcgccacagcgtggcgggcctgcgcggctcggccgatgcgctggctgtggccgcgtacgctcggcagcaccgcgagcgcgcgccgatgctggccgtagtctgctcccacgcggtcgatgcccagcgcctggccgaggaaatcccctggttcgcgcccgaactgcgcgtgcgcctgctgcccgactgggaaaccctgccctacgacagcttctcgccgcaccaggacctggtatcagagcgcctggccacgctgcacgacatccagaccgggcaatgcgacgtgatgctggtgccggccaccaccgcgctgtaccggctggcgccgcccgcgttcctggccgcctacaccttcttcttcaagcagggcgagcggctggatgaagcggcgctcaaggcccagttcacgctggcgggctacgagcacgtcagcgcggtgatgcgccccggcgaatacagcgtgcgcggcggcctgatcgacctgtacccgatgggctcggcgctgccgtaccggatcgacctgttcggcgacgagatcgagaccatccgcgccttcgaccccgacacccagcgcagcctgtacccggtcaaggaggtgcggctgctgcccgggcgcgagttcccgctcgacgaagccgcgcgcaccgccttccgcggccgctggcgcgagctgttcgaaggcgacccaaccaagtcgccgatctacaaggacatcggcaacggcgtgccgtcggccggcatcgagtactacctgccgctgttcttcgagcagagcgcgaccgtgttcgactacctgcccgccgatacgcagctcgcgttcgccggcaatgtcgacgaggccatccgccgcttctgggccgacaccacgcagcgctacaacttcatgcggcacgaccgcgagcgcccgctgctgccgccagcggacctgttcctgtccgaggagcagttcttcgtcgccgccaagccgatggcgcgcctggtgctgcaggccgaagcgaacgcggaccaggccgcgttctcggccatcctgcccgacgtcgcggtgaaccgccgcgccgatgatccgctggtcaacctggaagcgctgctactcgaccagcagacccgcgtgctgatgtgcgccgactcggccgggcggcgcgagaccctgctgcagctctttgccgaaagcggcctgcgcccgcagccggtggacgactttgccgcgttcctggccggcgaagcgcatttctcgatcgcggtggcgccgctgcagagcggctttgcgctgccgcaggggcagatcgcctttgtcaccgaggccgagctgtacgccggcaccgcgcgccgcaccggccgccgcaagcaggagcaggcctccgccgtcgactcgatggtgcgcgacctggccgagttgaagatcggcgacccggtggtgcacagcgagcacggcatcggccgctatcagggcctggtcacgctcgacatgggccagggcgacgaggaattcctgcacctggactacgacaagggcagcaagctgtatgtgccggtgcaccagttgcatgtaatctcgcgctattccggcgccgatcccgataccgcgccgctgcaccacctgggctcgggccagtgggacaaggccaagcgcaaggcagcccagcagatccgcgacaccgccgccgagctgctcaacctgtacgcgcgccgcgccgcgcgcgagggctttgccttcccgctctcgcccaaggactacgagaccttcgccgaaagcttcggcttcgaggaaacgccggaccaggccgccgcgattgccgcggtgatcgccgacatgacctcgggcaagccgatggaccggctggtgtgcggcgacgtgggcttcggcaagaccgaggtggcgctgcgcgcggcctttgtcgcggtgctgggcggcaagcaggtggcgatgctggcgccgaccacgctgctggccgagcagcacttccagacgctgtccgaccgcttcgccgaatggccggtgcgcatcgtcgagctgtcgcgcttcaagaccaagaaggaaatcgacgcggccatcaggcagatcaacgaaggcaccgtcgacatcgtcatcggcacccacaagatcctgtccgaccaggtcaggttcgagcgcctggggctggtcatcatcgacgaggaacaccgcttcggcgtgcgccagaaggaggcgctgaagaccctgcgcgccgaggtcgacgtgctgaccctgaccgccacgccgatcccgcgcacgctgggcatggcgctggaaggcctgcgcgacttctcggtgatcgcgaccgcgccgcagaagcggctggcgatcaagaccttcgtgcggcgcgaggaagacggcgtgatccgcgaggccatcctgcgcgagctcaagcgcggcggccaggtctacttcctgcacaacgaggtcgagaccatcgagaacaagcgcgcgcggctggccgagctggtgcccgaagcgcgcattgccgtcgcgcacggccagatgcatgagcgcgagctggagcgcgtgatgcgcgacttcgtcgcgcgccgcgacaacatcctgctgtgcaccaccatcatcgagaccggcatcgacgtgccgaccgccaacaccatcctgatccaccgctcggacaagttcggcctggcgcagctgcaccagctgcgcggccgggtcgggcgctcgcaccaccaggcctatgcctacctgctggtgcatgatgtcgagggcctgaccaagcaggcgcagcgccggctcgaagcgatccagcagatggaggaactgggctcgggcttctacctggccatgcatgacctggaaatccgcggcgcgggcgaggtgctgggcgacaagcagtcgggcgagatccacgagatcggcttccagctctacactgacatgctcaacgccgcggtcaaggcgctcaaggccggcaaggaacccgacctgatggcgccgctggccgcgaccaccgagatcaacctgggcacgccggcgctgctgcccaacgactactgcgccgacgtgcacgagcggctgtcgctgtacaagcgactggccaactgcgagaccgccgagcgcgtggacgatatccaggaagagctgatcgaccgcttcggccgactgccggcgcaggcgcaggcgctggtcgagacccaccggctgcgcatcgccgcggcaccgctgggcgtgcgcaagatcgacgcgggcgaggccaccatcagcgtgcagttcgtgcccaacccgccgatcgacgcgatgcgcatcatcgacctggtgcagaagaaccgccatatcaagctggccgggcaggacaagctgcgcatcgaggccaagatgccggacgtggcgatccgcgcgcagaccatcaagcatacgttgcggcaactggcgtaggggtcatgcgtatcctgcatggacgcggcgcgcggccgggtgtagcatcgattccttaacaagttagcgataacgcccccatgcccgcccaagccgcttcttcccgtcagcccgtcaccgaaaccgccgcgcgcggcagcgcgcttgaatggacccagcggctggtcgcgtacgacaccaccagccgcaactccaacctgggcctgatcgagtcggtgcgcgaccatttcctggccaaggggctgaagccgcatctgagctacaacccgcagcaggacaaggccaacctgttcgtcaccgtgcccgccgccgacggcaataccaacggcggcatcgtgctctccggccataccgacgtggtgccggtggacggccaggactggaccaccgacccgttcaagccggtggtgcgcgacggcaagctctacggccgcggcacctgcgacatgaaaggctttatcggcaccagcctgtcgctgctgccggccatcctgcaggccaggctgcgcgagccggtccactacgcgctgtccttcgacgaagagatcggctgcatgggcgcgccctacctgctggccgaactgcgcgaccgcggcgtgacgcccggcggctgcatcgtcggcgaacccaccagcatgcgcgtgatcgtggcgcacaagggcatcaacgcctaccgttgctgcgtcaggggccaggccgcgcactcgtcgctgacgccgcgcggcgtcaatgcgatcgaatacgccgcgcgcctgatctgcttcatccgcgacatcgccgatgagttcaaggccaacggcccctacgaccaggccttcgacgtgccctacaccaccgcgcagaccggcaccatccagggcggcatcgcgctgaacaccatcccggcactgtgcgagttcgtgttcgagttccgcaacctgcccggcgtggatcccgaagccatctacgcccgcatccaggcctacgccaacgacgtgctgctgccgaagatgcgcgccgagcatgccgacgccggcctgacgctgagcaagatcgccgccgcgccgtcgctggacgtggccgaacaggaagccatcacgcagctggtgcgcgcgctgaccgccgaccgcgacaccaacaaggtggcctacggcaccgaggccggcctgttccagcgcgccggcattccggccgtggtgtgcgggcctggcgatatccagcaggcgcacaagccggatgagtttgttgcgctggagcagttggctgcttgcgaggcgttcctgcacaaggtggtcgacagcttgcgcgtgagctgactgccgggcatgccagagctttgctcccctctcccgcttgcgggagaggggagcaaccaatccgcttttcccggcgctttgcacttgccgcgcgccgccacaccgcctgcatcacaccaacaacaacgaaggagaccttgcatggctgtccgtgattccgcatcccgtcccaccacccgcttcgcgctcgccaccctggcgctcgccaccggcctgctctgcaacaccgcgcaggcccagacgcaaggcgccgaaaccctgcacgcccagatcgaaacccgcgccaaggccgtcgagaaacaactcatcgcgtggcgccgcgatatccaccagcatccggaactgggcaactacgagacgcgcaccgccaagctcgtggccgaccagctgcgcaagctcggcatggaagtgaagacgggcgtggccaagaccggcgtggtcggcgtgctcaagggcggcaagcccggcccggtagtggcgctgcgcgccgacatggatgcgctgccggtcaaggaacgcgtggacgtgccgttcgcgtcgaaggccaagggccagtacctgggcaaggaagtggacgtgatgcacgcctgcggccatgacacgcacgtggcgattttgatggccaccgccgaggtgctggccggcatgaaggaccagctgcccggcacggtcaagttcatcttccagccggccgaggaaagcccggccgacttcgaaccgaatggctccaacacctggggcgccaagcagatggtgtccgagggcgtgctggacaatcccaaggtcgatgcgatcttcggcctgcacgtgagcagcggcatcgaatcgggcaagctgggctggcgcagcggcccctcgatggcggcggccgaccagttctggatcgacgtcaagggccgccagacccacggcgcgcggccgtggggcgggatcgacccgatcgtggtggcgtcgcagatcgtgatgggcctgcagaccatccagagccgccaggtcaacgccatgctggagccgtcggtgattaccgtgggcaccatccacggcggcaaccgcatgaacatcgtgccggagaaggtcgagatgatgggcaccgtgcgcacctatgacgaaggcatgaagaaggacatccatgcccgcatgaagcgcaccaccgaggccatcgccaccagcgccggcgccgaggccagcttccgcgtggtggagttgtacaacgccaccatcaaccagccggccctgaccgagaagatggcgcccacgctgcagcgcgtggccggcgaaggcaactggatgatcacgcccaaggcgaccgcgtcggaggacttctcgttctaccaggagaaggtcccgggcctgttcttcaacctcggggtgacgcccaagggccaggatgtgaccaaggcgccttccaaccactcgcctgagttctatgtggacgagccggcgctgatcaacggcgtgcgcgccctgtccagcctgaccgtggactacatggtgatggcgcagcgctgagcggctcgcccggggcgctgcggcggggctacaatagcgcttttgccgcgttgcagccccgcgcggcaagcgcccgaccttcatccgccatgcccctgatcctccagagcaccgccccgctttccccagccgacctcgacaccgcccgcaccctggcccgcgcctctgaactggtgctgcgcagcgagaccgtcgccgccgccgaggaatgcgcgccgctgacgccggcgctgcgcgatgcgctggacgatttctgcggcccgcgcgcgatcgactgggcagtggtgcccgcggggcgcaagctgtccgacttccacctggtggcgatggacatggactcgaccctgatcacgatcgagtgcatcgacgagatcgcagatttctgcggcctcaaggccgaggtctcggccatcaccgaagccgccatgcgcggcgagatcaccgatttcaacgaaagcctgcgccgccgcgtggccctgctcaagggcctggacgccagcgtgctggaccgcgtctatgaagagcgcctgcggctgtcgccgggcgccgagcgcatgctgcagaccgtgcaggcgctgggcctgcgcacgctgctggtgtcgggcggcttcgtgcatttcaccgagaagctcaaggcacggctccagctcgacgtgacccgcgccaatacgctggagatcgtcgacggcaagctgaccggcaatgtcgtcggcgagatcgtcaacgccgacgtcaaggcccgcaccgtgcaggaagtctgcgcccggatcggagccacgccggaccaggccatcgtcatgggcgatggctccaacgacctgaagatgatggccgtggccggcctgtcggtggcattccgggccaagccggtggtgcgcacgcaagccagcgtcgcgttcaaccacgtcggcctggacggcctgctggcgctgttcccgcactgatcccgggccgcagacaacgcggcaatgcgcgccgggcggcaagcgcccggccggccccacccgcgcgggccgcctgcgactcgtcgccacagccagcgcaagtccctcccccaagtgcagatgaatccccactgagacgcaacgtctacttagcgcttgcctcttcaaatgcgaatcattaccattaatgtttcgtttatctgacatttccccatgcaagttctggccgtccttcttggcctggctgcggctgcgtgcctgtacctggccgcgcccaaccaggtcctgctgccgcccggcagggtcacgcaaccgcgtatgctgggctggctgggcctggtcctggtcgtcgtcagcacctggctgtggagcaacaccgatggctggcccgcagccattgccgccagcctggtgaccgtgccctgcgcgctgtcggtatggccctttatcgccacctatgccgcgcgcaagcgccgggcagcacgggagcaacgggcatgagcgcagaccgctccgcaatgggcaccaaatggcttgccggtgcgctgctcgggctgccgctggcggtggcgctgtgcacgctgttgatcctgtggctgccgggcggctgggaaaccggcatcgtcgcggccgtggtggcctgcctgccggtgtgggtggccatcatcagcgccagcctgctgttccgttccagccgcactgcctgggtctggctgggcggcgccaacctgctctgcttcggcgcgctctggctgctgcgcctggccaggctggcgccgacggcactggccgcctcctgagaacgccatcatgaaaaccgcaaccctgcgcctgtaccagacgctgcatacctgggtcggcctgatggccggctgggccctgtttatcgccttctttgccggggcggtcaccgtgttccaccatgagctgcacgtttggcagtcgccgtcgcggctgaaaggcaatgcgcagttcgaggccagtaccgacccggccgcggtcgaccgcttcatgcagaagctggtcgcgatccaccccgaggccgcggccagctcatacgtgatcatgccgtcggagggagagcccaatatcgcggcctactggcaggaccaggccggcgagtggcagatgaccaccgacgcccgcctggccggcggcgccgcgatgcagcgcgacacctcgcgcgaccaggtgatcggcgaactgtcggcattcctgaacagcctgcactactcgctggggatcccggtcggcggcatctatttcatgggcgcgatctcggtgctgtacgggctggcactggtatcgggcgtgctgctgcacctgccacggctgaagaaggacctgtttgcagtgcgccccgggcgcaacctgaagcgcttctggatggacacccacaatgtgctgggcctgttcagcctgcctttccacctggtctttgccatcaccggcgcgctgttctgcctgtcgctggtgctgatgatggcgttcaacacactgaccttcgatggccgcctgttcgaggcggtgccccgcgccaccaccgccgtgccggaagtggccgcggccaaccgcgcggtgccgaccatgcccacggcaacgctgatgcagatcgcgcgcgagcacggcggcgagcgattcacgcccgagtcgttccgcttccagcgctatggcgacgccaacgccgtggtggaggtgcgcggcaccagcacgcaggcactcggcaacctgggctcggtcggcatccatgccgccagcggcgagcccaacgcgggccagctgaccgccaaccagaccgccggcacgcgcgacagcaaccacgggctctacagcgcgctgtacgcactgcatttcggcactttcggcgagctgccggtgcggctggtctacctgctggccgggctcgccggcgccttcctgttctattcaggcaacctgctgtggatcgagtcacggcgcaagctgcgccaggccgagcagcctcgcgtgcaccggctgctggcgcagggcacggtcggcgtgtgcatcggctgctgcatcggcgtggcgctgtgcttcccggcggcgctgctgtggccggagcgcgcggtgagctacacgtatttcacggtgtttgtcctggcctgtgcctgggcgctgctgcgcccgccggtgcgcgccgcggtggaactgctctacgccgccgcgctggcgtggctgacggtgccgctggcgaatgcgatcctgaccggcgaccacctgctgcacagcatccccagcgggcactggatcatcgccggcttcgatatcggcgcgatcgcgctggccacgggctttgtcgccctggcccgcgccacgcagcgccgcgcgcgcagtgggccggcggagtcggtctgggcgatgccgcgggcagcccaagccgcccagaccgccaggcccaccgcgggcgccaaggcgatgcccagcacggatacgccctgagcgcatgacgcccgcacgcaagaacggacgcagcagcgtccgtttttgtttcctgggcagcaccagcccggcccctgccctacactatctcaggccaacaacatcgagcctaccgccatggaatcgaccttccaccagttttccgaactgttcgcccagctcggcctggcctccgacgaagccagcatccgcagctttatcggcacgcacgccccgctgcccgacgatgtcgagctggccgaggcaccgttctggacccccgcccaggccacgctgctgcgcgacgaactgctggacgacgccgactgggccgaggtcgtcgaccagctcaatctcgccctgagacagccggcctgaggccgcttacgcggccagcgtagcctccagcgcctggcgcaggtcggcgatcaggtcgcgcgtgtcttccaggccgatataaagccgcaccagttcgccggcatcctgccagccggccggcggccaggtgcccgccgggcgcatgccctgcacgtggtacggcacggccaggctgtgggcaccgccccaggaccagccgatcgcaaacagctgcagcgcctcgaccaaggcatccacctgctggcgtgtatagcgtgcccgcaggatgatggcaaagagcccgctggcaccggtgaaatcgcgccgccagctggcgtggccggggcagtccggcagcgcaggatgcagcacgcgcgcaacctcgggccgctggcgcagccactccgccacttcgcgggccgcacggtcatgcgcggccaggcgcaccggcaggctcggcagcccgcgcagcaccaggtggcagtcatcggcggaaacaccccagcccatcagcatgcgggtgcgcttgaggcggtcatgcagcgcatcgtcgcaggtcagcaccgcgcccatcagcacgtcgctgccgccggactggtacttggtcagcgcctgcaccgagatgtcgatgcccttgtcgaacgggcggaagtagatgccggcagaccaggtattgtcgatcgcggtcagcacgccgtgcgccctggccgcggcgacgatggcgtcgctgtcgggcacttccatggtcaccgaaccgggcgactccatccagatcaggcgcgtattcggccggatcatcgccgccatcgcagcagcgtccatcgggtcgtagtagcgcacggtcacgccgaattcgcgtgccagccactcgccgtggtcgcggttggggccgtagacgttgtgcggcaccagcacgtcgtcgccgctcttgagcagcgcgaagtagaccagcgagatcgccgccagccccgacggctgcagcagcgtgtggcgcgcgccctccagcagcgccaggtgctggcacagcgcctcgctggtgggcgtggcgtgcaggccatagcgccagtaggtggtggcaccgtcgccatgggcgcgcagttcggcgaggttgcggaacaccacggtggagccgcggtgcgtggcgggagagaacgaggcaaagccgggcgcgatctccagctcgggctggaccgcaacggtttgcaggtaatgggcgggcgacgcgggcttgtcggatggcgaatcggacacggcggtttccttgctggctgctggccggacacggcgcgctgtcccggcggtatcgcccgggcagaagcgtggcacggtcaggaatgagactcgatgagcctccgagcttaccagcaaatgccggccgcgccaccggcgatggcaacggcggacactagtaagcggcttaccagccggaaatcgaggacttcggcggcggcggcgcgtaagtgacgccgctgttgggcctcatgtcgaacggggggatcaccagcacgcccagagggcggataaagaacggcagcacgatggccgggttgaacgcgtcggtccaggtgccgcgcacggcgccgctggcgtcgatgctgccttcccagttgcccgatacgcgggtgccgtcgtcggactcctccatcaggaaggcgccgtcctcccactcgcctgccagcaggcgcacaccggcgccacggccggcgtattcgccacgcacgctgtcgcgctcgtcaggcttggggcccaggcgcagccgcaccggctggtcgccgaccttgccgacgtagaccggcagcgacgcatattccggccgcggcgccaggggttttggcgcgccagtggaaagcgaggtgccgccgcgccgggcttcgccgtcgcgaatggcctggttgatgcccaggccttcgccgccggctggcccggtgttaaccgggccggtcgacagctcggtcgccggcgctgcctgcgccgtgcccgccagcgcgagcacggcggccaggccgagcgcgcagaggttcttcgtcagcgaagcaaggcgcaaggctaacctcagatacgctcgaagatggcggcaatgccctgcccgccgccgatgcacatcgtcaccagcgcgtagcggccctgcacgcggttcagctcatgcagcgccttcaccgtgatcagggcaccggtggcgccgatcgggtggcccagcgagatgcccgagccgttcgggttaaccttggccgggtccagaccgagcgccttggtcacggcgcacgcctgtgcggcaaaggcttcgttggcttcgatcacgtccaggtccgacacctgcaggccggcgcgctccagcgcgatcttcgtcgccggcaccgggccgatgcccatggccttcgggtccacgccggcatggccgtacgacaccaggcgggccagcggcttcaggccgcggcgctcggcttcggcgcgctccatcatcaccaccgcggcggcggcgtcgttcaggcccgaggcattgccggccgtgaccgtgccgttttccttgacgaagaccggcctgagcttggtcatgtcgtcgatggtggcgtcatggcgcacgtgctcgtcggtgtcgaaggtcacgtcgcccttgcggcccttgctcaccaccgggacgatctggtccttgaagtagccggccttgatcgctgccgaagcgcggcggtgcgattccagcgcggcctcgtcctgctgcgcgcgcgagatgtcgtattccttggcgacattctcggcggtcacgcccatgtggatgcgatggaagggatcgtgcagcgcacccagcatcatgtcgaccaggccggcgtcgcccatgcgtgcgccccagcgcgctgccggcgccaggtacggtgcgcggctcatgctttccgcgccgccgccgatggcgacgtcggtatcgcccagcaggatggtctgcgcggcgctgacaatggcctgcaggcccgagccgcacaggcggttcacggtcagcgcgggggcgttgatcgtcaccccgccgttgacggccgcgacgcggcccagatacatgtcgcgcggctcggtctggatcacgttgccgaataccacgtggccgacatcgtcgcccgacacctgcgcgcgcgccagcgcctcgcgcaccaccagtgcgcccagctccgccggtgccacatccttcaggctgccgccaaaggtcccgatcgcggtacggacaccgcttaccactaccacttcacgcgtcatgactttgtctccatgaggttatgttgcaccgcacagtatagcgggacgcggacgaaatcgaacgagcgtacttttacctaatcaacccgtttcagaccgcgccccacaggtcgtggccatcggcgccggtgatcttcacgtcgacgaactcgccggcgcgatagcgctgggcgtggcgttccggcggcgcgatatagacgaggccgtcgatttccggcgcatccgcggacgaacggccgatgccgccatcctggttgacctcgtccaccagcacgcgcagggtctggccgaccttgcgctgcaggcggcgcgccgagacctcttcggccacttccatgaagcgggcgcggcgttcctcgcgcacctcgtcgggcagcgcgcccggcaggtcattggcggtggcgccctccaccggcgagtaggcgaagcagccgacgcggtccagttcggcttcggcgataaagtcgagcagggtctggaactccgcctcggtctcgcccgggaagccggcgataaaggtgctgcggatggtcagctcagggcagatctcgcgccaggcgcggatgcggtccatggtcttctcggcattggccgggcgcttcatgcgcttgagcacgtccgggtgcgcgtgctgcagcggcacatcgaggtacggcagcacatggccctgcgacatcagcgggatgatctcgtcgacgtgcgggtacgggtagacataatgcaggcgcacccaggcaccgtactgcgcggccagctcgcccagcgccgccaccagctcggtcatgcgggtcttgagcgggcggccgttccagaagccggtgcggtacttgacgtcgacgccataggcactggtgtcctgcgagatcaccagcagctccttgacgccggccttgaacaggttctcggcctccagcatgacctcggccaccgggcgcgacaccaggtcgccgcgcatcgacgggatgatgcagaacgagcaacggtggttgcagccctcggaaatcttcaggtaggcgtaatgcttgggcgtcagcttgatgccggcggccggcaccaggtcggtgaacgggtcatgcggcttgggcaggtgcgtgtgcaccgcctgcatcacctcgcccagcgcatgcgggccggtcacggccagcaccttggggtgcaccgacgacacgatgtcgtggcccgccgcatccttcttcgcacccaggcagccggtaacgatgaccttgccgttctcggtcagggcctcgccgatggcgtccaggctctcctgcacggcctcgtcgataaagccgcaggtattgaccacgaccaggtcagcgccgtcataggtgccgctgatggcatagccctcggcgcgcagctgggtgatgatctgctcggagtcgaccagggccttggggcagccaagggaaacgaatcccacacgcggactatggtctttctgggtcgttgattctgaagggtttttcacagtgcaatccgaatgtgggggcgggcgcggcgaatatgcggggacaaggccggcagccggtgagccaatcgcgcattttaaccgtttgccatgaattctcggcgcctgacaccatacatgtggcccaggctgcgtcattccggcgcggtcgcggctcccggcaggccttccaggacccgctctatctccagcgagtcctgcatgcgccggatggccgcatgcagttcggcggcctgtggccaggtccgcttgagatagctgagccacagtttcacgcgcccatgctcatggcacgacgcgatacgggcatgcagctttttcaggtaggtggcgatctggcgcagcaccagcggccactcctggtccgacggcgaaccgtccatcagcccgcgaatgcgcaaggccaggaaaggatcggacacggcgccgcgcccgatcatcacgtcggcgcaaccgctgacggcccggcaacgctcccagtcggcgacggtccagacatctccgttggcaatcaccggcacgtccaccgccgccgcaatgcgcgcgatccagtcccagtgggccggcggccggtagccatggtcccgcgtccgggcatgcacgacgagcgaagccgcgccgccttcggccagcgccgtggcgcaatcaatggccagcgaggcatcggaaacgcccagccgcatttttgccgtcacggcgatatgggccggcaccgccgcgcgcacggacgcgacgatccggttcaacaactcaggattcgtcagcagcatggcaccgccgccatgccggttgacgaccttggcggggcagccgaagttcaggtcgatgccatgcggcgacaaggtcgcggcataggcggcattgcgcgccagccattccggatcgctgccgagcaactggatcaccatcggcgtgccgctgcgggtatagccgccggcgaggatttcgggcgtttcgcgctcgtagacgcgggcgggaagcaacgaaccggtcacccggacgaactcggacacacagccgtcgtagccgccagtgtcggtcagcacgtcgcgcaagacgtagttggcaagcccttccatgggggccaggaacagccggctcatggcgaagccttcatcgaagcagagagccgggccttaaggggcggacgagcatattggataacggagggcatgggttttcgcgcacaaaaggcgagtccacactgagccgccgctggagagagttgcgtgattgcgtgcgcccggggacgcagaccgcgcattctacctgctttgcatcagcacggttttcagggatcggcgattctcttaccgtagcccacaggctacggtaaggtatgctcagcatccggacaacccaaattttcgaccgctggtattcggccttgcgcgaccacgtcgccaggattcgcatccaggtccgcgtcgaccgcttactgaacgggaatcccggcgacgctaaagcccttggcggtggagtcagcgaaatgcgcgtggaccacggcccgggctaccgcatctactttcagcaacgcggccaggtaattgtgatcctgctttgcggaggcaacaagtcgacccagcacgctgatatcgaaagagcacgcagtctggcggccaatcttgatctggagtgagccatgaaggaaccaacccgcccctgggactccgccgagcatctgaggaacgatcaggagatcgccgcctacctggatgcctgcctggccgaggccggcgacgacgatcgattcattgcctacgcactcggggtggtggcgcgtgcgcgcggcatgacgcgactggcccgcgaaacgggcctttcgcgcgaaagcctctaccgctcgctctcaggcgaaggcaatccggagttcgggacgatctggaaggtgatgcgggcgctgggcatccgcctgcatgcgagcgctggctgagtgccagccagcgtgcgggatatgcggcgggtgtagcgcccgccgctgccagtgtcttacttcttgtccggctggttgaacgggaacgtcccgaacatatttttggcctggctttgcatctgctcctgcatctgcacgaacaggttcttgctctgctcgatgtagttgctcatcatgccctgcatcatcgggccctgcatgttcatgaactgcgaccacatgtcggggctgaaggtttcgccggaatacaggcccttggagttctcggccagcttgttctggatgtcgatgaaggcctggatgttcttttccaggtaggtgcccatcatgccctgcatggcatggccgtagaagcggatgatctgcgacagcatcgcgctggagaacatcggcacgccgcccgtttcttcttccaggatgatctgcagcaagatgctgcgggtcagttcgtcaccagacttggcgtcgacgaccttgaattcttctgaatccatgaccagctgcttgacgtcggccagggtgatgtaggtgctggtctgggtgtcgtagagcctacggttcggatactttttgatcagtcgctctgcgccttttttggtcgtggccatcggtgctctgtccttgtgtcatcgctgtttgcgcgctgctgcaccgcatggggtgcagtgcgcaaatcggtatcgcccgcgccatctgcttgttgtcgtgccggccatctggtggcccgttcgcgcatggctgcgcgtggcggcctgcagcctcgcccccgcgagggccgcgctgcacgaacatggtgctggctgcgccgctgccctgattctatgcccaacaaggcactaagaaaagcgacggggcttaaggaaaacccggtgaattggcgcaaaaagcgaggaatgccgcgcgggcagaaacgattcgcgggccttgacggcccgcgaaacgggcggcgaaacgaaacgcccgccgccttgtgcgccgcgctggctgcaccgcaatacgcgggcgccagcgccggctgccgactggttgaaccaggccggcaggtcagcccatatgcaggccgccgttgagcgagaagtcggcgccggtcgagaaaccggactcctccgacgacaaccaggcgcagatcgaggcgatctcttccggcaggcccaggcgcttgaccgggatcgtcgcgacgatcttgtcgagcacgtcctggcggatcgccttgaccatgtcggtggcgatatagcccggagagaccgtgttgacggtcacgcccttggtcgccacttcctgcgccagtgccatggtgaagccatgcaggccggccttggcggtggagtagttggtctggccgaactggcccttctgcccgttcaccgacgagatgttgacgatgcggccccagccacggtcggccatgccgtcgatcacctgcttggtgacgttgaacagcgaggtcaggttggtgtcgatcaccgcatcccagtcggcgcgggtcatcttgcggaacaccacgtcgcgggtgataccggcgttgttgatcagcacatcaacctcgccgacctcggacttgaccttgtcgaatgcggtcttggtcgagtcccagtcagccacattgccttccgaggcaatgaaatcgaagcccagggccttctgctgctccagccacttttcgcggcgcggcgagttggggccgcaaccggccaccacacgaaagccatccttggccagccgctggcaaatggcggttccgataccacccatgccgccggtcacatacgcaatgcgctgagtcatgtccactccttgattggcttcgttatcgtcgccgggtccgcgccaaccgcgcgcggccccggaaaaccccttccttatttgcgctcgactgccagcgccacgcccatgccgccgccgatgcacagcgaggccaggcccttcttcgcgtcacggcgcttcatctcgtgcagcagcgtcaccaggatacggcagcccgacgcgccgatcgggtggccgatggcgatggcgccgccgttcacattgaccttggaggtgtcccagcccatctgctggtgcaccgccagcgcctgcgcggcaaaggcctcgttgatctccatcaggtccaggtcttgcggggtccactcggcgcgcgacagggcgcgcttggaggccggcaccgggcccatgcccatcaccttgggatcgacaccggcgttggcatagctcttgatcgtggccagcggggtcaggcccagttccttggccttggccgccgacatcaccaccaccgcggcggcgccgtcgttcaggcccgaggcgttggccgcggtcaccgtgccggccttgtcgaaggcgggcttgaggccggacatgctgtccagcgtggcgccctggcgcacgaactcgtcggtcttgaaggccaccgggtcgcccttgcgctgcgggatcagcaccgggacgatctcttcgtcaaacttgccggccttctgcgcggcttcggccttgttctgcgagccgacggcgaactcatcctgcgcctcgcgtgtgatgccgtattccttggccacgttctcggcggtgatgcccatgtggtactggttgtacacgtcccacaggccgtcgacgatcatggtgtcgaccagcttggcatcgcccatgcggaaaccatcgcgcgagcccggcagcacgtgcggggcggcgctcatgttttcctggccgccggccaccacgatctcggcgtcgcccgccatgatcgcgttggcggccagcatcacggccttcaggcccgagccgcacaccttgttgatggtcatggccggcaccatcgccggcaggccggccttgatcgcggcctggcgtgcggggttctggcccgaaccggcggtcagcacctggcccatgatgacttcgctcacctgctccggcttgacgccggcgcgctccagcgcggccttgatgaccacggcacccagttccggtgccgggatcttggccagcgagccgccaaacttgccgaccgcggtgcgggcggcggatacgatgacaacgtcagtcattgtgtagtcctttcaatggaaacgggagggaacctgcaggcctgccggcgccgtgcatgacgcacgccggcactcatgcaagcgtcatgccttggctttgacgtatcgcccaggcgcgggttcgattgcgcgatagcgcgcattgccatagttggcgggcgcggcgcgtttcgcgccggcctgcccggccagccatgcggtccagtccggccaccagctgccgtgatgctcgatggcgccggccagccattgctgcggcgactccggcagcgcatcgttagtccagtggctgcgcttgttcttggccggcgggttgatcacaccggcgatatggcccgacgcacccagcacgaagcgcagcttgttcgccagcagcgcggtcgaggcataggccgcggtccacggcacgatatggtcttcgcgcgagccgtagatataggtcggcacgtcgatgctggccaggtccaccggcacgccgcacacggtcagcttgcccggtaccttgagctcgttctgcaggtaggtgtggcgcaggtaccagcagtaccacggccccggcaggttggtggcgtcgccgttccagaacagcaggtcgaacggcaccggcgtgttgcccttcaggtagttgtcgaccacgtagttccacaccaggtcgttcgggcgcaagaacgagaaggtattggccagctcaaggccgcgcagcagcgcgcacggcgcgccggcgccgccgcccagcgtggcctcgcgcaactgcacatggccctcgtcgacaaagacgtcgaggatgcccgtgtcggcaaagtccagcagcgtggtcagcagcgtgacgctggcggccgggtgctcgccgcgcgcggccagcaccgccagcgcggtcgagacaatggtgccgcccacgcagaagccgagcacgttgatcttgtcctggccgctgatgtcgcgcgcgacttcgatggcgcggatggccgcgtgctcgatgtagtcgtcccaggtgctgccggccatgctggcgtccggattgcgccacgacaccagaaacaccgtatgtccctgctccaccacatggcgcaccagcgagctctccggctgcaggtccaggatgtagtacttgttgatgcacggcggcaccatcagcagcgggcgcgcgtgcaccttgtcggtcagcggcttgtactgcaacagctggaagtactcgttctcgaagaccacggcgccttcggtcaccgcgacattgcggccgacctcaaacgcgctctcgtcggtctgcgagatcttgccgcgtgtcaggtcttccatcatgttgcgcacgccggcacgcagcgattcgccgcccgactcgatcagcaggcgctgcgcctcgggattggtggcaaggaagttggcgggcgacatcgcatcgacccattgcgagatcgcgaagcggatgcgctggcgggtcttggcatcggcctcgacggcatcggccagctcggtcaaggcgcgcgcattgagcaggtagaacgcggcagcgaagcgatatgggaggttggtgcgctatgcgtcgccggcgaagcgccggtcgtgcagcggaccggtggcctcggccttgccctcggccatggcctgccacagcgctgagaagtccttcatgtagcgctgctggatatcacccagctgcgccggcgcgatcttgacgcctgccagcgcatccaggcccggaatgccggacgcggccgcgtggccgttgccttcagtgccctgccactggcgggaccattccagccatgtggctggatcgaatggccccggcgtgaccttgaatggttgggacttgccttcctgcgtggaagctgccgcgcctttgccggtcgccatgatttgattgtctctctgccgtcactattcgaaccggctccgggcattgccctggccggcactttgcatggggagatgctatccgaatggacccggcttgcgcctcccccaaagcgggagggtctgccggcacatctgccctggaactggctggaagccctcgaccgcacctgctgcggccgtggcttgcgtccattccgatagcggctccccttttatccggcaagcgcgacattctcgcatggagacgccatgcgctatgcttgccggagaaacctgggaatcgtcagcgattccgagacatttgagtccattgttgccttgcaacgcacgcgctgtcaatgcgggaatccgcctcggcactgcacgcttcccgacctaccggacggtatgcagcgctcgcatctgccgaggccccagagcataggcgagaaggatgaatttttgatgtacatcgtggccattggctggctctacgtggcgctgatgatggcgatcaccgagcacaacgtggtggcaggcgttgccaccttcctgatgtatggcatggcgccggtggcgctggtgctctacatcatgggcacgcccggccgccgccgacgcaaggctgaagccgagcgcgcgcaggcggccaggggcaaggacgagtgaggcagcggcgggctcagtccgccagccagaccaggctggccatgcggccggtcacgccatcgcgccgataggagtagaagcgaccggcgtcggccacggtgcaggcgtcgccgccgtagacctcggtacagccggcgcgcgccaggcgcgtgcgcgccagcgcatagatgtcggcaaggtacttgcccggggcaccagggcggaaggctgcggcaaccgcgacctgttcatcggcgcgtgcctgggccaggaaggcatcgcgcacttcggcacccacctcgaacgcatcggggccgatggccgggcccagccatgccagccagcgcgcggcaccggcagcggcctgcatccgtgacagcgtggcttcgatcacgccgctgcacaggccgcgccagcccgcatgcgcggcgcccaccaccgtcccctgcgcatcgcatagcagcaccggcaggcaatccgccgtcatcacggcgcagacttggccgggtaccaccgccaggctcgcgtcggcctggggcacgggcgcgcccggggccgccacatggtcgaccgtggcgaccgcgcagccatgcacctgctccagccattgcggcatcgacggcaggcaggcggccagccgcgcgcggttgcgcgccacgtcggcggcgtcgtcgccaacgtgggtgcccaggttcaggccgccgggggcgccgccggcaagcccgtacgggcccttgctgacaccgccctggcgcgtggttgacaacgcgcgcacacgcgccggcgcgggccagtcagggaccagccaggcgcgatcaggcgctgcgctcatcgtcatcgtcgtcctcgtcatcaccagcgtattcccagtgggcctcgccgccttcccagacttcgtcccagccttcttcatcctcgtcggcctgcgcgctttcaaaatccagcgcatcgatcagcgcctgcaggtcttgcggcggctgcgcggtccacgacatgcgcttgccggtggccggatgcaccaggccgagctggtacgcatgcagcgcctggcgctcatacggcaccggcagcggtgcgcggaccgccgggcgctgcccgcgctgcgtggcgcggaagtaggccgggtcgcccaccagcgggtggccgatcgactcgaaatgcacgcggatctggtgcgtgcggccggtctccagcttgcacatcaccatcgacacgaagccccgccccagcggcaccgtggccagcgtgcggaaatgcgtgcgcgacggcttgccgctggcggtatgcacgaccgccatgcgcgtgcgctcgcgcgggtcgcggccgatgggcgcgtcgatggtgccctcgtcataggtgcggccccacaccagcgcgatataggtgcgcttgaccgtgcgcgcctgcagctggcgcaccaggtcggtctgcgcggtcagcgagcgcgccaccaccatcaggccggaggtttccttgtcgagccggtgcacgatgcccgcgcgcggcagcaacgctgcgccggggtcgcggtgcagcaacccgttgagcacggtgccgctccagttaccggcagccggatgcaccaccagcccggcgggcttgttgatcaccagcagggtgtcgtcttcatagaccacgtccagcggcacgtcctcgggcgagaaagcggacgattccggtgcggcctgcggctggatttcgatgcggttgcccatctgcacggcgtcgcgcggacggcgcacgtggccgtcgacacgcaccgcgccgctttcgatccactgctgcaggcggctgcgtgaaaactcgctgaagtgacgcgcgagcaatttatcgagccgctcgccatgcgaggcgctgtccacctccagcgacagggtcacggccggctcggcagccgccgcgccgccgggcggcacctcggcaaggtcttcaaattcctctggatgggcctcgaaatcggccacggacgcggctgcgcgcacccgttctggtggaagtcctcccacgccagctcctgcttcggggttgggctgggggcttgggctataatgcttgacgctatttttcttcatccgggatacgattgcccatgcaattgcagagcatgaaacgcgcgcgctggcgcacgacaattggagcggttctgctcgcaggcggctgcgtcatgctgtctgcatgcggcctgctggcggaccaacccgacgagaccgcaggctggtcggccaacaaattatattcggaagccaaggatgcgctggatggcggcgactacacgcgtgtcgtcaagctgtatgaaaagctcgaaggccgctatccgtttgggcgctatgcacagcaggcccagatcgataccgcctacgcaaactacaaggatggtgaaacggcagcagccctggccgcggtggaccgcttcatccagctgcacccgaaccatcccaatatcgattacgcctactacctcaagggcctgatcaacttcaacgacaacctgggctggctgggccgcttctcgggccaggacctgagcgagcgcgaccccaaggccgcgcgcgccgcctatgacgcgttcaatacgctgatcacgcgctacccggaaagcaagtacacccccgacgccacgctgcgcatgcagtacatcgtcaactcgctggcccagcacgaagtgcacgccgcgcgctactactaccggcgcggcgcatacctcgccgccgtcaaccgcgcccagcaggcgctgaaggactatgacggcgctccggccaacgaagaagcgctgtacatcatggtccgttcatatgacgcgatgggaatgaaggacctgcgcgacgacaccgcacgcgtgatggagcgcaatttcccggacagcgatttcatcaagtacggcgcgcgccgcaaggacaagtcctggtgggaagtgttctgacgccggctggccagaggccataaaaaaacgggacgtatcctccgatacgtcccgtttttctttttccggcacctgtgcgatcagtccgctgccgcggcctccttgccaggaccgcgcagcgactccaggaaccgcaccaccgtcgccgcctcacgcgtgcgcgtgaacggcggcaggctttgccagatctgacggccatagggcttctcgaccagccgcgtatcgaagatcgccagcacgccgcggtccgattccgagcggatcagccgccctgccccctgcttgagcgtgatcaccgcatgcggcagctggtgcacggcaaacgggctcaggcccttcttctgcagcacttccatgcgcgcggccagcaccgggtcgtcgggcggcgcgaacggcagcttgtcgatgatcaccagcgacagcgcctcgccgcgcacatccacgccctcccagaagctctggcttccgaccagcaccgcgttgcccagctcgcggaagcggtccagcaattcggtgcggctggcctggccctgcaccagcagcggcaggttcaggccgcgctcggcaaacgcgtcataaagcaggtccgaggcacgctgcacggcgcgcagcgtggtgcacagcaggaaggtgcgtccgccggcggcctcgatcagcggcaatgccgcctgcaccaccgcgtcggtgaactgcggcgactgcggctgcggcatatcgcgcggcacgtagagcagcccctgcttcgcgtaatcgaacgggctgggcagcgtcagcgagcggtccttgtcgagccccagctgcgccgcgtagtgggtgaaattccccttcaccgacagcgtcgccgaggtgaaaacccaggcgcgcggctggccgtcgcgctggcgcgtgaagatcggcgcgatcgacagcggcgtgcggtgcaactgcacagtatgcgagaacacctcgacccagcgcacggtttcagggccggcaggcagcgccggcgcggcttcgccgtcgccctcggtcggctgcggtgccggcgcgggcgcggcatcggcgcgccacgcggccagcttgttggtcagctccagcgcgcggcggtggcattgctgcagcgattcggcacgctcggcctggctttcgagcatctcgacgaagtctgacagggcttcgtccagcgcatcgagcgtttcgttgaaaggctcggcgatacggcggtcggcctcgatctggcccagcgccagccgcgcattgtccttgctgaaggccaggcgcaggtcgcgcgcggcgcgctccagcggcgcggccagcgcaacccagtccaccgcatcgcgcgcgtgcgacaggccttcggccacggtatcgcgggcgatttccagcagctggctggtggacagcgtctcgccgaagaacagcgtggcggtctcgggcagctggtgggcttcgtcgaagatcacggtgttggcggccggcagcagttccgccatgccggtgtcgcgcagcaccacgtcggcaaagaacaggtgatggttgaccaccaccacgtcggcctgctgcgcttccttgcgcgcgcgcatcacaaagcattccttgtaatgcgggcattccgatcccaggcagttgtcgcgcgtggaggtcaccatctgccataccggcgcgttctcgggaacggacgccagctcggccttgtcgccggtggaggtttccttgatgaagcggccgatgtcgcgcagccacgccgcatcctggcgcgacgccaggcggccgttggcctgagcgcgttccaggtggtagtggcagacgtagttggcgcggcccttgagcagcgccaccgagaccggcacgttcagcgcatggcgcaccgtggggatgtcgcgcaggaagagctggtcctgcaggttcttggtgccggtcgacaggatcaccttgccgccccacagcatcgccggcaccaggtaggcgtaggtcttgccggtgccggtgcccgcttcgacgatgacggaatcgttctgcacgatcgcgtcggcgacggcctcggccatcttgtgctgcgaggcgcgcggccggtagccgggaatcgcctgggccagcgtgccggtatcggcaaagatggtggccagttccgcgccgcggctggcgccgtcgtcggcgggcgcggcaggcgcgggcgacccggcgtcggtcaggctgacggcttcggacggctcaggagaatctggaagatcggacaaggcagggggagatgttgtatgggccgccggacagcgccggcggcgatcggcaagcctggcgcgaatgcgctcaggccggcacgtcgggttcgagctgcagctgcagcagcgtgatggcgtccttcagcttgaggcggcgcttcttcagccggcgcagctgcagttcgtcatggacggcatcgttggcaaggcggtcgatcaggaaatccaggtcgcggtgctcgatctgcaactccatgatgcgccgctccagggtattcaggttgctgtccatctatgcctccgctgcgcagtcacggtgccggacctcaaaagccgaacgggcgcggcgccgatgcctgcccctgttgctccttcgccttggcgcggcgctcttccagctccttctggcgccgttcgaggtcgcgctgcttggcctcgtatgccttgacattctcctgccgctggcgggcctgctcggcgcccttctgctgggcctcctgcatgcgggcatcgaagtcagactgcttcttttcgtacgcctgcgcattggcggcacgctgcggcgcctcgccctggcgctgcgcctcgcgcagctgctgttcctgctgcttcttctggaaggcctcgcggctggactgctcgctggccgagcgcttcggctggctggcctcgaactcggcgcggcgcagcgcctgttcgcggtcgcgctcggcggcgcggtaggcgcgttcggcctcgcctacctccagttcgcgcttgcgcagcacctgcagctcctcgcgctggacttccttggcgctgttgatgcagtggttgacaaagaacttgccgtagcactcgcgctcggcggccgcaaagcggtagttggtccaggcgcgcgaatcctcgacggccttgcgttcggcggcaaagtcgcgctggccgttggcggcgggtggcgccgcgggcgcggaagtctgggcgcgcgcctcgcgcagcggcatcagcacggcgcatgcagccacggccagtgcagccaggcggccgaagcggaacagggaagtttcaggcacgttggcgaaggttggcatggccaggatggtggccttggcggcggccgggcgggacttgacggtcatgaccggattctagcatccgggccgggcaccggcctgccctgccgggccgttgcggacgtgcgcgggacgccgcccgccccgcacccgctgcgcgccctggcgaatcccttgcgcgcttgtggcaaaatgccccgctttcgactgactgcgtttctcgccgcgctctccgatgtccaacctgcccgcatccgtctcgcaaaagatcgtctcgctcatcgcggctgaactgtccgtgcagccccgccaggtggccgcggccgtggcgctgctcgacgaaggcgccaccgtgcccttcatcgcccgctaccgcaaggaagtgaccggcaacctcgatgacacgcagctgcgcaacctggaagagcgcctgctgtacctgcgcgacatggaagaccgccgcgctgccatcctcgcgtcgatccaggagcaaggcaagctgacgcccgagctgcaggccgccatcgaggccgccgaaaccaagcaggcgctcgaagacctctaccttccctacaagcccaagcgccgcacccgcgcccagatcgcgcgcgaatgcgggctggagccgctggcgctggcactgctggccgatcccacgctggatccgcaggccgaggccgccaggtacgtcaacggcaacccgaccgccgacggcggcgtgcctgacgtcaaggccgcgctggacggcgcgcgcgacatcctgtccgagcagttcggcgagactgcggaactgctgggcaagctgcgcgagcacctgtggaccaacggcgtggtgtcctccaccgtgatggaaggcaaggaaaccgccgaggaagagaagttccgcgactactacgcctacagcgagaccatccgcacggtgccgtcgcaccgcgcgctggcgctgttccgcggccgcaacgcgggcgtgctgatggtcaagctgggcctgggcgaggaacaggacgcgatggtgccgcacccgtgcgaaggcatgatcgcgcgccatgtcggcatccagcagttgggccgcccggccgacaagtggctgggcgacgtatgccgctggtgctggcgcgtcaaggtgcagccccacctggaaaccgaactgctgacacagctgcgcgaaactgcggagaacgaagccatcaaggtgttcggccgcaacctgcatgagctgctgctggccgcgccggccgggcccaagtcggtgatgggcgtcgacccgggcatccgcaccggctgcaagatcgccgtggtggacagcaccggcaagctgctggacaccgccaccatctacccgcacgagccgcgccgcgactggaacggctcgctcgccacgctggcgcgcctggcaaggcagcacaatgtggcgctggtgtcgatcggcaacggcaccgccagccgcgaaaccgacaagctggtgcaggacctgatgaagcagatgcccgagctgaagctgaccaagatcgtggtcagcgaggccggcgcttcggtgtattcggcgtcggaactggccgccaaggaattcccggacctggacgtgtcgttgcgcggcgcggtgtcgattgcccgccggctgcaggatccgctggccgaactggtcaagatcgatcccaagtcgatcggcgtgggccagtaccagcatgacgtcaaccagcgcgagctggcgcgggcgctggacgccgtggtcgaagactgcgtcaacgccgtgggcgtggacgtcaataccgcctcggcgccgctgctggcgcgcgtgtcgggcctgaacacggtgctggcgcgcaatatcgtcgagttccgcgacgccaatggcgccttccccaaccgtaacgcgctgaagcaggtgccgcgcctgggcgacaagaccttcgagcaggccgccggcttcctgcgcatcaacgacggcgacaatccgctggaccgctcctcggtgcacccggaagcgtatccggtggtgcagcgcatcctggaacacgtcaagaagggcctgcgcgacgtgatgggcaaccgcgacgcgctgcgcgggctgtcgccgacgcagttcaccgacgactccttcggcctgccgaccgtgcgcgacatcctgtccgagctggaaaagccgggccgtgacccgcgccccgagttcaagaccgcaaccttccaggaaggcgtggaagacgtgaaggacctgcagcccggcatggtgctggaaggcgtggtcaccaacgtggcagccttcggtgcgtttgtcgatatcggcgtgcaccaggacggcctggtccacatctcggcactgtccagcaagttcgtcaaggacgcgcatgaggtggtcaaggccggccagatcgtcaaggtcaaggtgatggaggtcgacgtcaagcgcaaccgcatcggcctgtcgatgcgcctggacgacgagccaggccaggccgcggcgcgtgccggcggcgaccgtggtgaccgcggcggccaacgcaacggcggcggcaagggcttcaacggcggccgccgcgaggcggaaccggccagcgccatggccgcggccttcgccaagctcaagcgctagcccgcaagccgatggcatgacgccccgcacgggcgaccgtgcggggcgtcgtcgttttcagccgccgtgcgcgatccgaacggccaggcccttgccggcgccatcggtgcggttggcgaacgcaatctccagcccatgcagccgcgccacgcgctgcgcgatcgaaatgccgaggccgtggccctgctcgcgctgccccgatccgccacggaagaagcgatcgcccagccgcgccagcacgtcaggcgcgacgcccgggccctggtcgagcaccgtgacgctgtcgggccggaaatcgatggtcaccagcgcgcccggcgggctgtagcggatggcgttgtcgagcaggttgcgcagcagcagcgacagcaggttggcgtcacccgccaccggcaatggcgcctgcccttccgggggccactccagctcgacgtcgacctgcttccgctgcgccagagccaggcagtccgacagcgcctgctgcgccaccgggatccagttgaccggctggcgtgacggcaggccggcagcatcttccagccggctcagcgtcagcagctgcgacaccagccggctgatgcggtcgatgccggtggccacgttggcgcgtgcctgcgcgcgctcggcgtcatcggccgaacgctcggcgatttcccactgcgccttcagcgcggccaacggcgtgcgcatctcatgggcagcatcggcggtgaggcgccgttcatgctcgatcgaatccgacacgcgcgccagcaggcggttcatggcgtgcaccagcggcaccagttcgcccggcactgcctgcaggctgagcggccggcggtcttggggggcgcggccttcaatatcggtcgacaacgcgcgcaccggcgccatcgcgcgccgcatgaaccagatcaacaggccgatcagcaccggcaggcctgcggcccacggcagcacctgcgcggcgatataggacaggatcagctcattgcgctcggccagttgctggcccacgcagacgcgccagcccgtgtcgggatcatcgaggtagtaaagccgccaggactgcttgtcgatggtgacgtcggtaaagcccttcactcctggcgcacgcggcagcaggtcgccctcgggatcgatatgcaagggcttgccgtccggcagccaggcggcgatggcgagatcgcccaggcccgcatcgccctggtcgccctcgaccagctctggcagccgggtgcgcgacggcgccgcggcgacatccaccagcggcaccaccgaatgcatctgcagcgccatgcgcaccatgtcggtgtcatagagttcattgatctcgtgccgggcgcgcacgtaggtcatgccgatggtcagcagccacaccaccggcgcggcgatcagcaccgcaaggatgagccggcgctgcaacgtcatgtgcaatcctcggccgcgcccagcgtgtagccggcgccgcggaaggtgcgcacgatcttcggatggatcttgcggcgcaggtggtggatatggacttccagcgcgttgctttcaacgccgccctgccagtcgtagagcttgtcgcgcaggaagtcgcgcgtcagcagccggttggggtgcgccagcagcagctccagcagcatggcttcgcggctggtcagctccaggggcttgccctgccagtacgcctggcgcgcggccggatggaattccagcgcgccgtgcttccacactggagacgacaggcccgcggcgcggcgggtcacggcacgcagccgggccgccagctcatcgagcgcgatcggcttgaccaggtagtcgtcggcaccggcgtcaaggccgccgatgcggctgtcgatcgcatcgcgcgcggtcagcacgatcaccgggatgcggctgccgcgcgcacgccagcgcgcgagcagcgacatgccgtcttcccctggcaggcccaggtccagcaccacggcatcgtagtggaccacgccgagcgcatggtcggcttcggtgccggtgctgaaccagtcgaccgcatagtcgagcagctgcaggccgcgccgcagcccgtcacccagcatcggggcgtcttcaacaataaggattctcattttctcgggtgacccggacgtatcacggtattgtgcgcgccccgccttaatgtgccattaaggttcgcgaactatcctgcgctcactttgcaggcgccccgctgttcaacgcggcgcgggccgccagcgtggacatggccttgccgccgagcgcctgcacgccgccacgcgcgccaccacccacccttccctttcacgccgagccgtttgcgcatcatgcaccgttccgaccgcctcgccgccgagcctgggctcatcagcgcccggcccgccgcgccgtggcatgccacgcggctggcgggcgtgcccgcggtgacgctcgggctggtggtgctggcgttcgcgctgctttggttcggcacgctgggcgtgcgccacctgctcgggcccgacgagggccgctatgccgagatcgcccgcgagatgctgagcacgggcgactgggtcacgatccgctacaacgggctgaagtacttcgagaagccgccgttccatatgtgggccacggcggtgtcgtacgcgctgttcggcatcggcgactggcaggcgcggctgtgcgtggcgctggccggcatcgccgggctgggaatatcgatgctggccgcggcgcgctggttcggcgcgcgtgcgggcttgctggccggactggtgctggcaagcgcgcccatgtggaacctcgccgcgcacttcaatacgctggacatgacgctgtccggcagcatggcctgcgtgctcgcgtgcatgctgctggcccagcatccgcacgccacggcgccggcacgccgccgctggatgctggcgtgctgggcggccatgggcgtggcggtgctgaccaaggggctggtcgggctggcgctgccgggactggtgctggtggtgtacacctgcgtgacgcgcgacctcgcacggtggcgccgcctgcatgcgccggccggcatcgccctgatgctgctggtggcgatgccttggtactggctggtggcgcggcgcaatccggaattcctgcgctttttctttatccacgagcactggcagcgatacacctcgaccgtgcatgcgcgcaagggcgggctgtggtacttcgtgccgctgctggtgggcggcttcctgccgtggctcgggctggttcccggcatggtccgcgcggtcgggcagcgtaccggcgtggttgccgcgggtgggtccaggccgttccagcctgcgctgatggcagggctgtgggcggtgtcgatcttcgtgttcttcagcctgtcgggctcgaagctgcccggctacatcctgccgctgtttcccgcactggcgatcctggcgggcgcagcgctggcgcggaccggtgaccaaccctggcgcaggcagctgtgcgccatgctggcggtgggcgcgatcggcctgctggcaagcccggtcgtggccacgctggattccaacaacacccccaacgcgctgtaccgcgcgtatgccgcatgggtggcgctggcattcgcgctggtgattaccagcgccgccatcgggctgtggctgctgcggcggcatggccgcctggccagcatcacggcctatgcattcggcatgctgctggcattctccaccgcattgctgggccatgaagcgatcggccgctccgcctcgggcatcgacatggtggcgccgatcgaacgcgtgctgcgccccggcatgccgctctacggcgtcggcatgctcgaccataccctgcccttctacctgcgccatccgctcaccatggtggcgcaggccgacgagctcgcgttcggcgccggacaggagccgcagaagtggctgccgaccctcgatgccttcgtcgatgcctggcagcatggcccgcgtgccatcgcgctgctctcgccgcaggcattctctgaactgagcgcgcgcgtgccgatgcatgtcgtcgcgcgcgactggcggcgcgtggccgtcgccaacttccccctcgccggcgcgcgctagccgcgccggcgcctcccgatttcccctgccattcgtcaaatccaatgcaaggcaagaaagtactgatcctcggcgtcaacggctttatcggccatcacctgacgcgccgcatcctggaaaccacgccgtgggaggtctacggcatggacatgtcgtcggaccgtctcggcgacctcgtcgaccacccgcgcatgcacttcttcgagggtgacatcaccatcaacaaggagtggatcgagtacaacatccgcaagtgcgatgtggtgctgccgctggtggccatcgccaccccggccacctacgtgcgccagccgctgcgcgtgttcgagctggacttcgaggccaacctgccgatcgtgcgcgccgcggtcaagtacggcaagcacctggtgttcccgtcgacctccgaggtctacggcatgtgcagcgatgaagagttcgaccccgaggcctcgccgctggtctacggcccgatcaacaagccgcgctggatctatgcctgctccaagcagctgatggaccgcgtgatccacgcctacggcatggagcaaggcctgaactacaccctgttccgtccattcaactggattggcgcggggctggattcgatcttcgaatcgaaggaaggctcgtcgcgcgtggtgacgcagttcctcggccatatcgtgcgcggcgagccgatcaagctggtcgacggcggcgcccagcagcgcgcctttgccgatatcgccgacggcatcgacgcgctgatgcgcatcatcgcgaatccaaacggcgtggccagcggcaagatctacaacatcggcaacccgggcaatatccactcggtgcgcgagctggccgagatgatgctgaagatggcggcggactatccggaatacgcggaggaagcgcgcaagacgcagatcatcgagacctcctcgggcgacttctacggcaagggctaccaggacgtgcagcaccgcgtgccgaagatcggcaacaccgtcgacgagctggggtgggaaccgaggatagggatggaggcgtcgctgcggcggatcttcgaggcgtatcgcacgcacgtgacggaggcaaggacgttggtgaaccagggatgagtttcgacacgtgtcgcaggcccgaggcacttgcctgaccgtgagtgctccctctcccgcaagcgggagagggagcactcacgcagcgtgcccaagcaccaggcacgcgcgcagcctcagccggccgacacctcgatccgccgcggcctcgcttcttccctgcgcgggatcgtaagcttcagcacgccgtcctgcaggttggcttcgatacgcgaagcgtcgagatccgggctgagcgtaaacgtccgcgcatagcgaggctgccgaatctcggcaagctgcacgcgcaggctcgcgggcgtcggcacgacggcttcgccttcgatgcgcaggctgctgtcgtgcacgttgacctcgaggttctcgcgcggcacgccgggcaaatccgcccacagcgtgaccccggcgggagtctcgtagatatcgaccgcgggcaccagcgtcatggcctgggtttccgcgcggcgttgcgcgacagcgccctggtcaccctggccgcttgtgttctggtcgcgctggacgacctggttcgaatcgctcatggctttctcctcacgttagctgacggtgatcgcgcgcggacgcgacgcttcgcgcttgcctacgctgatcgacaggcagccgttggtatagcgtgcctgcaccttgtcgggatcagccgactgcggcaattcgatcacgcggcggaagctgccgaagaagcgctcctgcgcatagggccgcacctcggctgcgccttccggctgcacctgggcacgctcgccgctgatggtcagcaggcccttgtcgatcgatacctcgagctggtccgtcttgatgccgggtgcgaataccacgatctcgatcgagtcatcggtcgtgccgatattcagcggagggaaccccccgaaacgcccggagcgcaggctggttggaaacccgccgaagagattcgccatctgccgttgcatccggtcgaattcactgaacgggtcggtcccgaaaaagaagtcactcatggttagatcctccttctatgcagcggggaggcgcaggaccctgatgtagtgcacctggtctcctgccaggccgctgcaaaccaacggaaaacacgcagtgccgcgttgccgcgacgactgggcaatccataattagtgctgtcccgcgcggatttcaaggggggcggatagcgggaaaatcggacgctggcaggtatcggccgcgtcacagccatcggttcgggatttcaggcgccagcgcggtcgaagccggccttgcgcgccagcacgatcgcctgcgcgcggttttccacttccagcttggcgaagatgctggtgatgtggttgcgcacggtcttctcgcacaggtccaggtgcgcggcgatctgggcgttgtcgcggccctgcgcgatcagttcgacgatatcgcgctcgcgccgggtcagtgcactgaaggcgggatctcgcaccggttccgtggccggcaggaaggcgcgcacctcgtccagccagcgcagccatgcgggctcggtttccagcaacaggtgattgccgctttccagcggcacgaagcgcgcgccgggaatctcgctggcgatcaggcgtccttcgtcgaacggcacacgcgcatcgcgcaccgcgtgcagcaccagtgtcgggcacgatacccgcggcagcagcttcaccacgtcgatctcattgaagacgcgcatgaagcgtgcggcattcagcggcgaggtagagacccgctcaagctcgttgaaccatgcatgctgctcggccgtgccgccggggatgaactgggtggtaaagaactggcggaaggccggattctcctggccccagccaagctcggcgagcttgtttatcagctcggcctcttccagcagacgctggctcaggttgtcgcgcttcaggcgcccgcgcgcgtaaccgccgtgcagcaccaggtggctgacccgttcgggatgcgcgaccgcgtaggcgacggcaatcgatgcgccctgcgagataccgagcagcggaaaatggttgaccccggtggcgtcgacgatggtctccaggtcgcgcagccaagcatcgaaggacaggtcctcgatctcccggtcagagagcccgcagccgcgttcgtcatagcggatcagcgtatgcgtggcggacagcgccgtgatcatgtggctccacaccgggctgcccacgtcgaactccaggtggctcatccagttggccgccttgaccagcggcgcaccgcagcccgtgatggcgtacgcaaggcgaacgccatcacggctggtgcacaggcggagctgctgcttgaacatcggcatgtcggggccgcgcggcactgggacggccggccggcagccgcgggccgcggccgccatgcgggcgcaccgcgtgacttccctagcttaggcaaaggatgggcggcgcaaaagcgccgtcgatcgctcaggacaggcattccccgctgccgcgtgcatcgctgcgcgcgccgtcgctgaaaccatcgcgggaactggttcgcgccccctcggtaaaggtatcaaagcgtcccatgcgcgcgccatccgtgtaaggatcaggcttgcgcatcgcatcccggttcggatcaaagccacggaccacgcacactgacatgctgccgcgcgccaccacgggccgcatcgcggcctcggcggcgggactgcgcgcgccctccgtgaaggcgtcgcgctgcgcgttgtggcgcggcgcggcagcggccagtgcttcgccataggcacccgcgtgggcggcatgactgaagccggcggcgagtgcggcagtggcaagcagggtcttggcaagattcttatgcattgctatctccaacagggatgccggcggcattgccgcgacggcactcctcatgcaggcgatcggctacgaaacggcacgggccgcacgggatcgcctcgaccgtgccagccgttgcctggcgcaagccgctgccatcccatcatggggctgcggcgcagcgcctgactcctggatcagtggtatgcggatgcggggaagcggccgccctgcctcagtgcagccatgcgagcatcgcgaacagcggtgccagcgacggcagcagccgcgccggactgtgcccgagtgccgccaggcacgccgacccgcggtcggcggccagcagcaccgcggcgtgccaggcaaccggatccgttgcctggcgtccgcgcagggagcgcgccagcgacaacgcgcgtcccagctcgcgcgccggcgtgccgtgatcgtgattcagctcacgcagtgaggcgaggcacgattcccagttcgcatgtgaatgacagaggacgtagagcagcaggagcgccggcagcagcgatggcagccacggcggcaacgcccgttgcagtcgacggatgcgacgggtaccgtcggcatgccggctggactggcgagaccactgctgcaacgcgcacatggcacaggctccttctggaagggaccgccatgaaggcggtcagtgacaagctgagggttgcattgtgtggcgaggggcggtgcgtacgcatgaggccggtgtcccgggtcagcgtcagcaatgcgcgacttcccgggacaagcgccccgagggacgggctgcgggtggcgcatggcaggcaggcggcgcaagccgggcaaaagcaaaacccccggatcgcctggcggcgtgtccgggggtcgctgaggctcgacgggagcgggcgccggggcccgcgcgttcagatctcgaccttggtgcccagctccaccacccggttggccgggatctggaagaagtccgacggcttggcgccgttctggtgcatccaggcgaacaggctctcgcgccacatcggcatgcccggcagcttggacggaatcaccgattcgcgcgcgatgaagaatgaggtctccatcagctcgaagtgcatgccaagcttgcggtcggccaggtccagcaccctctgcacatcgggcgtttccttgaagccgtattcggacttcaggataaagacgccgccgccaacgtccttgcagctcaggcgatggtcgtcgtcaacgtaggggatgtcgcgcgtgacgaaggtcaggaacaccacgcgctcatgcagcacgcggttgtgcttcaggttatgcagcagcgacaccggcacggactcggtattgccggtcaggaacaccgcggtgccctcaacccggtgcggcggatgcgccagcagcccggcgataaagggctcgagcgggatgccgtcttccaggctgcgcgcgcgcagcagcttgcggccgctgtaccaggtcatcagcaggaagaacgcggcgctgcccagcagcaacgggaaccagccgccttcggcaaccttgagcaggttggcggcaaagaacgacaggtccaccacgatgaaggccagcccgaccacggcaaccagcgcggggttccacttccagacgctgcgcatgcacaccgcggccaggatggtggtgatgaccatggtggtggtcacggcgatgccgtaggcagcggccaggttctctgacttcttgaacgagatcaccacgccgatcaccagcaccagcagcagccagttgatcaccggcaggtagatctggccgatctctgcggccgaggtgtagcgcacgcgcatgcgcggcaggaagcccagctggatcgcctggctggtcagcgaaaacgcgccggagatcaccgcctgcgaggcgatcacggtggcgcaggtggccagcagcaccatcgggatctgcagcagatcaggcaccatcaggtagaacgggttctcggcgccggccgggttgtgcagcagcatcgcgccctggccgaagtagttcagcatcaggcagggcatcaccagcacaaaccagccgatgcggatcgggcgcgcgccgaagtggcccatatcgacgtacagcgcctcggcaccggtcagcaccaggaataccgagcccagcacgataaaggcctgcagcgcgtgctccaccaggaaggtgatggcgtagtacgggttgatcgccttcaggatctccggcgcctgcaccaggtggagaatccccaacccccccagcgccaggaaccaggcggtcatgatcggcccgaacagcttgcccatggtcgcagtgccatggcgctggatcaggaacagcgccgccaggatcatcagcgtgatcggtatcacgaactgcgacagctgcggcgcggcgatctccagcccttccaccgccgacagcaccgagattgccggcgtgatgaccgcgtcgccgtagaacatgcaggcgccgaagatgcccagcatcatcagcaccctggccctgcccgagcgtggcgccacggtgcgcagcaccagcgccatcagcgccagcacgccgccttcgccgtcgttgtcggcccgcatcacgaagaccacgtacttgatcgagaccacgatgatcatggcccagaacagcatcgagatgacgcccagcacggcctccgggctgaacatgatgccgtgctccttgctgaagcactccttgagggcatacagcgggctggtgccgatgtcgccgaagacgacgcctaccgcgccgagcaccagggcgcgcgtgctcgggctctcgacaaaataatggctggttgtggactgggtcatgaaattgggtctgctcgaccaggtcgccggcaggtttgttggctctgccgcggcccggtcccatccagcgcaacagcttgctgcgcccgtttccggttctgcttgcggttcttattgcattgcacaaacgcgcgcaattctagatgaactgtcgactatcgaccactgcggcaaacagggatgccgctttcgtgacttcgcaaggatgggagggaagcggcggatggtcaagccctggaagagcaaaacagagtgtccttgcgcccgcaagcggcgttgcggcaggacaacatgagcgccttatgcggcgcttttcatctcaaacgcccaggtagcggtccagggcttcgggcttgccggcaaggtccgacgcggggccggccatcaccacccggcccttctccagcaccacggcacggtcggcatgcgccagcaccgagcggaaattgcggtcgaccacaaccgaggcgatgccagtgccacgcacggtggcgatgacctcccagatctcgcgcacgatgcgcggggccagcccttcggtggcctcgtccagcaccaggcagtcgggattggtcatcagcgcgcggccgatggacagcatctgctgttcgccgccggacagctgctggccgccatgggacaggcgttccttgagccgcgggaacaggtcgagcacgcgcgcctcgtcccagtcgttgcggccactgcagcccttgcgcgcggccatcagcaggttttcgcgcaccgacaggctggggaagatgccgcggccctccggcacgtaggccacgcccaggcgcgccacctcgaacggctgcgcgcgcgagacgtcgcggccggccacgcggatctgcccctggcgctggcgcacatgtcccagcagcgtgcgcagcagcgtgctcttgcccatgccgttgcggcccagcagcccgaccgtttcgcccacgcccacggtaaagtcgacgtcgcgcagcacgtggcttgagccataccaggcgttgatgccggtggcctcgatcatcggtgaattgatcggtgcgttcatgcggcctcgctctcttcctcgcccaggtaggcgacctggacctcgtggttggtccggatcgcctcggggctgcccgtggcaatcacggcgccgttgaccatcacggtgatgcggtcggcaaccgagaacaccgcgtccatgtcatgctcgaccagcaggatggcgtggccctcgcgcaggccgcgcagcagcgccagcatccgcgccgactcttccgcgcccatgccggccagcggctcgtccagcagcagcgcgaccggctgcgtggccaggcacattgccacctccagctgccgcttctggccatgggccaggtcgctggcaagccggtccgccagcggcgccaggccggcccgctccagcgcctcgtcggccagcgtggcgctggtgcggcagccctgggcgctttcccacagccgccacgcccgctgcgcgcgcgattgcgcggccagccggcagttttcgcgcaccgtcagcggcaggaagatattgttgtgctggtagctgcgccccaccccatggcgcgccagccgcggctgcgaccagccggtcacgtcctcgcccttcaggtgcaggcggccggacgacggcgccaattcgccggacaacatattgatcagcgtggacttgcccgcgccgttggtgccgatcacggcatggatctcatgcagtgacagcgacaggtcgacgcccgccacggcggtcaggccgccgaagcgccgggtcagttgctgcgcctgcaggatcggcgttccttgcgatatcatgcggcctccgtattgcggcgtccttcgctgcggctgtccgcagtgaccgcggcctcatccgtgccggtgccggcatcgccattgcggcgcccgcggcggccgtgccgcaacaccgacggcaggctgaccagcccgcgcggcagcagcgccaccgcgacgatgatgaagccgcccatcagcagctgccagtgcttggtcagcgtactgaaccactcggccagcagcacgaacgagaacgcgcccagcaccgcgccggccaggctgcccacgccgcccaggatcaccatcagcatggcgttgccggactggtgccacgacgcgatctccggattgacgaagccaaactggatcgcatacagaaacccagccagtcccgccagcatcccgcccgcgacaaaggcgccaagctggtagcggtaagtggcatagcccgccgcgcgcatgcgctgttcgttgtggcggatgccgaccagcgcgtgcccgaagcgcgagcgcagcaccagcgccagcaccgccaccgtcagcaccagcccgagccataccagccagtagaaatgcgtgggatcgttgaccgtcagcaggtgctcgccgggcaccgggaattccggccggaagtagatataggtgccatcgctgccgcccgcgatgttggtgtcgtggaagacgaaatacaccatctgcgcgaacgccagcgtcaccatgatgaaatacacgccgcgggtgcgcagcaccagcgcccccaccaccagcgccagcagcgccgatgccgtcagcgcaccagccagcagcagccagccgttgcccgggccggcctgcggcgccaggattgcggtggcatacgccgccatggcgaagtacgcggcatggcccaggctgaccagcccggtgtagccgatcagcagctgcagcgacagcgcgaagatcgccatgatcatcaccttgctgagcagctcgatgtagaacttgttgctgtccgcggtcagcagcagcggcagtgccgccagcaccgcgaacgccgccagccagcccagcccggtggccagcgtggcgttgcgcgaggagtgccggcgcgccggcaatgtcgtcggagtcatgtcatcctgccttgaacagtccctgcggcttccacagcaggatcaccgccatcagcaggtagatcaacacgccggccgcctcctgccagaacaccttgccgaaggtatcgacgaagcccagcagcagcgacgccaccagcgcgcccttgaccgagccgatgccgccgatcaccaccaccacgaagcagacgatcagcacctgcgcccccatgcccggatagaccgacgacaccggcgcggcgatcatgccggccagcaccgccagcgccacgcccagcgcgaacacgaagcggtacagcaccgtgatgttgatgcccagcgactgcaccatctcgcggttggtggcgccggcgcggatcatcatgcccagccgggtgcgccggatcacgtagtacatcgccagcgccaccaccaggcataccgcggagataaagaggcggtacaccggataagtcatgtcgttgccgatcgccaacgcgccgtccagcagcgcaggcacctgcacgccgtgcacgtcatcgccgaccaggatgctgcgcaactcctcgaacaccaggatcagcccgtaggtcatcagcacctgctgcaggtggtcgcgttcatacaggtagctgaagaaggcccattccagcacgtagccgaatgccaccgccagcacgatgccgagcgggatggcgataaacaggttgccggtcaggccggcaagcgtgaaggccaggtaggcgcccagcatgtagaagctgccgtgggcgagattgatcacgcccatgatgccgaagatcagcgtcaggccgctggccaccaggaacagcagcaggccgtactggacactgttcaggcactggatcaggaaggagacgatatccatgcggggtaatgcatcaaattacctacagcgccacacatgccggtggcaggcccccctctcccgcgcgcgggtgaggggttggggagagggccgggcttgcgggatgcgaaggccttcacttcgtggggactcctgccctctcccccgccctctcccgcaggcgggagaggggagcaaaccgactggccgggatggccttacagccggcaaccgcgcgcaggatcagccagcgccttcaccgccaccgagctgaccttgttctcgcgtccgtcgaccttgcgcaggtagaagtcctgcaccgggttatgcgccttggacagcgtgaaggcgccgcgcgggctgtcgatcctggcggcgcccatggccttgtacaggtcggccttgcgcgtcatgtcgcccttcaccgccgtggcgccggccgccagcagctgggcggcatcgtagccctgcactgcgtacacgtcgggctgcagcttgtaggtcttggcgtagtccaggcggaaattcttgtcgcgcgggttggtcaggccatcggcgtaatgcagcgtggtttccaggccctgcgcggcagtgccctgtgcttcgagcgtgccgtcggtcaggaagcccgagccgtacagcgggatcttgtccttgagcccggccgccgcccagtccttgacgaacttgaccgcgccgccgccggcaaagaacacgaacacggcgtcaggcttgagcgacgccacttcggtgatcagcgcctggaactcgacattggggaacggcaggttcagttccttcaccaccttgccgcccttggcctcgaacgcctccttgaagccctttaccgactgttcgcctgcggcgtacttccaggtcagcgtcaccaccttcttcaggccgcgctcgcccagcacctggcccatggcgtaacccggctgccagttcgagaacgaagtgcggaagatattggggccgcacagcggaccggtggcctcgtccacgccggcattaggaatgatcagcagcgtgttgttctccttggccaccttgacgatgcccatctgcacgcccgaatgcaccgtgccgaccaccacgtcgacctggtcgcgcttgaccagcttggtggcgttctccggcgccttggccggatcggattcatcgtcgaccttgaagtactcgatgtcgcgtccgccgagcttgccgccctgctgctgcacgtacatgcggaagccgttttcgatggccgtacccagggccgcgtaggtgccggtgtacggcagcatgaagccgaccttgatcttgccccccggcgcagcgggtgcgggggccgccggctgcgcggacgcgccggccatggcaaagacggtggcgacggcaaggcaggcaggcgcaagcctgcgcgaggtgaagcgacgcatggtgtctcctggtggtcaagccggtggctcgctggaccgttgccggtcacccctgcccttgccgtgtcccgcgccggcgcatgcaccgtgaggacccttcgcaacaggcgggaagccgaattattttaggtttgaagtatatgcgtttatatgccgaaccgcggccaacgtcaacggatctttttggtcgcgatgtggcgaatgtccacatcgcgcgagtttaagcaaggtggtctggggggcatatcgatggataccctcgatctgcgccatggtgccgtattcgtcgtcctcgccctgcaccgccagtaccgggcagcgcagcccggacagcagcggacgcaggtcccactgacggaattcggggtcgagccagatatcgttccagccccagaaggccgaatcgacgtcgtcatgatggcgcgccagccgctggcgcaagtcggtttccaggtaagcctggcgcgtgcccgcgatgctgcgcaccgacagatcttccaccacgatatgcggcgccagcacaatgatgccggcaaccgcctgcggaaagctggcggcgtggatcagcgcgatcgagccgccgtcgctgtggcccagcagccagggcatgccatgcgcgcggccgggaccgatgtcgagcgcgtcgaacaatgcgggcatcgcctcgcgtgcctggcgatgcatgaagtcgggacgccatttttcctcgtgcggccgcggcgtcgaacgtccgtagccatagcgcgagaacaccaggccgcgatagtcgccggcttcgcaaaattcgcgcggaaaatcgcgccacatgctgaccgagcccagcccctcatgcaggaacaccaccagcgggcgccgcgcgcgttcaggccgcagccactggtactcgatccggatacggcggttgtcgaagggaatttccaccaggctgctttgcatgggcacgttgttgtcttgcatcggttcagaagggatatccggcggttacgggcgcttcattgcgccgcctcccgcgcggcctgctcgcgctggcgcaggcggaagcgctggatcttgccggtcgcggtcttgggcagttcgggcacgcattcgatctggcgcgggtacttgtacggcgcgaggcgcgacttgataaaggcctgcagttccgccgccatgccgtcatgccattgctggccgggccgcagcacgacaaaggccttgggcttgaccagttcgtcggcatccgtgacgccgatcaccgccgcctccagcacggccgggtgctgcgccagcgcggcctcgacctcgaacggcgacacgtagatgccgccgaccttgagcatgtcgtcgctgcggccggcataggtgtagtagccatcggcatcgcacaggtacttgtcgccgctgcgcgtccactccccgacaaaggtatcgcggctcttgtcgcggttgcaccagtacatcagcgcggcactggggcccttgatatagaggtcgccgatctcgccgggcgcgcacggctcgccgcgctcgtccagcagcttcagcgcgtagcctggcaccggcttgccggtggtaccgtagcgcacctcacccggccggttcgacaggaagatatgcagcatctcggtggagccgatgccatccaggatgtcgcagccgaaatgcgccaggaagcgttcgccgatatcgcgcggcagggcctcgccggcagaggtgcatacgcgcaacgccacctcggcgcgcggcggcagctcaggcgccgccagcatgcccgcaaacagcgtgggcacgccgcagaacaccgtgggccgctgctcgcgcagccgcctgaacacggccgccggcgtgggccgttcggccatcagcacggtggtggcgccgaccgacatcggaaaggtcagcgcattgcccagcccgtaggcaaagaacagcttggcggccgagaacactacgtcgtcctcgcggatgcccagcacctggcgggcatacaggtcagccgtatggaacaggttgccatgcgtgtgcacggtgcccttgggccgtccggtcgagcccgacgaatacagccagaacgccatgtcgtccgggccgctgcgcacggcctgcgcgggagaacgcgtgcgcgccagcatcgcgcccacgctgcatgccggcgcgccgtcggcatgcggcgccgcctggatcaccatcggcgccagcccgctcttgtcgatggcggccttcatcaccggcagcagcggctccgacaccaccacggcgcgcgcgccgctgtggccaagcatgtaggcgtaatcgtccgcggtcagcagggtattgaccgccaccggcaccacgcccgccagcaggcagccgagaaataccgtggggaaatcaatggtatcgagcgcgcacagcagcagccgctcttcctggcgcaagcccgcgtcgcgcagcgcgccggcaaagcggcgggcacgggcatcgagctcggcgtaagtcagcgaggcggtgtcgtcgatgtaggctgtcctggccccgcgcccggccgcgagattgcgcgacagcaggtcctcggcggcgttgtagcaggtgggcagtgccgccacggcatcggtagcgggtggaacagccggcggcacgggcgatgctgccgctggcatgccggcggcggtattggggggcgtcattgtctccactccttggggtcgcgccgcgggccatgggcgccgcgccagcgtcagtccagtcgctgttctgcttgccgatgtccgccaacgtgcatgccggcatccgcttgttgatgcattttatttcatatcaactattatgcaagcgaggggatgcactataggacaggctttatcgaagcgactgcctgccgcgccacttggctcaccaaggctgctcgtataatgcgcccttgctttttctgccggtcaacccgaaaccaccaccatgcgccgcgatcccgccccgctgcccgccaacgagaccgaagccgacacgcgccccgccggggatgcgcccgcagccgccaacgccgagcgcgacccctacctgaccctgctgggcgagcgcatccgttcgctgcgggcctcgcgcggcatgtcgcgcaaggacctggcgcgcggcgccggcgtgtccgagcgctacctggccaacctggaaaccggcaccggcaatgcgtcggtgctgctgctgcgccaggtggcgcgcgcgctcgacgtgccgctgccggtggtgctggccgaagtggacggcctgaacggcgagcaggccaccgagtttgcgcagatggtgcaatggctggcgcagttgcccgcgggcgacctggcgcgcgtgcgtgaagcctgccgccatgcactggcccccgcagagtccggcgatgcgcgccaccgccgcatcgcgctgatcggcctgcgcggcgccggcaagtcgaccctgggccgcgcgctggcagcggccagggacgtgccctttgtcgaactgaacaccgtgatcgagcaggaggccggcgccagcctgtcggaaatccattcgctctacggccaggcggcctaccgccgctacgaaatgcgcgcgctggaacgcaccctgcgcgagcacgaccgcctggtgctggccacgccgggcagcctggtctctgaacccgccaccttcaacctgctgctgtcgcagtgctacaccatctgggtgcgcacctcgccggaggaacacatggcgcgcgtggtggcccagggcgacatgcggccgatggaaggcaaccgcgaggccatggccgacctgcgccgcatcctgcaggctcgcgcgccgctctatgaccgcgccgatatttcgatcgacaccagcggccaggacgccgccacctcgctgcaacaattgcgcgcccagctctaggccgccggcgcgtgactaccccgccggccgcgcgcgggtgacaaagacattgcgccagccgtctccatgcactatatttcatcaaaagccgcaaggcactatagtgcactcaggagacagccatgtccgcgccggcaaccgccccactgcgtcctgaccagtcagccgccccgtcagacgcacccatcaccttcgagcgtcatcccgaccagtatcgccactggaaactgagtttcgacggccccgtcgccacgctggcgatggacgtcgacgaggaaggcggactgcgccccggctacgcgctgaaactcaattcctacgaccttggcgtcgatatcgaactgcacgacgcgctccagcgcatccgcttcgagcaccccgaagtgcgcaccgtggtgctgaccagcgcgcgcgaccgcatcttctgctcgggcgccaatatcttcatgctggggctgtcgtcgcatgcgtggaaggtcaacttctgcaagttcaccaacgagacccgcaatgccatcgaggatgccagccggcactcagggctgaagttcattgccgcctgcaacggcaccaccgccggcggcggctatgaactggcgctggcgtgcgacgagatcgtgctggtcgatgaccgctcgtccgcggtaagcctgcccgaggtgccgctgctgggcgtgctgcccggcaccggcggcctgacccgcgtgaccgacaagcgccacgtgcgccgcgaccacgcggatatcttctgcaccaccacggaaggcgtgcgcggccagcgcgccaaggactggaagctggttgacgaagtggtcaagccggcgcgctttgccgagcatatcgccgagcgcgcggcggcgctggcggccaccagtgaccggccgcagggccaccacggcatcacgctgacaccgctgtcgcgcaccatcgagcccgacggctaccgctacgagaccgtgcgcgtgcatgtcgatgccgcgacgcgcaaggccacgctgaccgtattcgggcccgacaagcaccagcccgcggatctcgccggcgtggtcgcggccggcgcgcaatggtggccgctgaagatggcgcgcgagcttgacgacgccatcctgacgctgcgcgccaaccatctggatatcggcatctgggtgctcaagaccgatggcgacgcggccgcggtgctggccgccgatgcgctgctgcaggcgcatgccggccactggttcgtgcgcgagaccatcggcatgctgcgccgcacgctggcgcggctggatgtatcgtcgcgcagcctgatcgcgctgatcgaagccgattcctgctttgccggcacgctgctggaactggcgctcgccgccgaccgcagctacatgctgcacctgcccgacgccccggacgacgcaccgcgcgtgttcgtctccgcgctcaacttcggccactatcccatgcccaacgggcaaacccggctggcggcgcgcttctatggcgacgaggccgcgctcacggcggtgcgcgagcacatcggtgcgccgctggatgcgctcagcgccgattcgctcgggctgatcaccgccgcgcccgacgatatcgactgggaggacgaaatccgcatcgccctggaagaacgcgccagcctgtcgccggatgcactgaccgggatggaagccaatttgcgcttcggcggcgccgagaccatggaaacgcgcatcttcggccgcctgaccgcgtggcagaactggatcttccagcgccccaacgccgtcggcgagaacggcgcgctgaaggtcttcggcaccggcaacaaggcacgcttcgactgggaccgggtgtaagacaacaaggagacagcacgtgagcatcgactacagccagaagatccccaacaacgtcaacctgtccgacgaccgtgcgctgcagcgcgcgctggaacactggcaaccggcgttcctcgactggtggcgcgacatggggccggacggctcgcacagcttcgatgtctacctgcgcaccgcggtgtcggtcgatccatcgggctgggcgcacttcgaccacgtcaagatgccggactaccgctggggcatcttcctgcagccggccgaccccgagcgcaggatccacttcggcgagcacaagggcgaagccgcctggcaagacgtgccgggcgagcaccgcgccaacctgcgccgcatcatcgtgacgcagggcgacaccgagcccgcctcggtcgagcagcagcgccacctgggcctgaccgcgccgagcctgtacgacctgcgtaacctgttccaggtcaatgtggaggaaggccgccacctgtgggcgatggtgtacctgctgcaccgctatttcggccgcgacggccgcgaggaagccgaggcgctgctggagcgccgctccggcgaccaggacaacccgcgcatcctcggcgccttcaacgagcgcacaccggactggctggcgttcttcatgttcacctacttcaccgaccgcgacggcaagttccagctgtgcgcgctggccgaatccggcttcgatcctctggcgcgcaccacgcgcttcatgctgaccgaggaagcgcaccacatgttcgtgggtgaatcgggcgtgtcgcgcgtgctccagcgcacctgcgaggtgatgcgcgaacgcggcatcgaagaccccgccgaagtgcgcgccgccggggtgatcgacctggagaccatccagcgctacctgaacttccactacagcgtcaccatcgacctgttcggcgccgaccagtcgtccaacgccgccaccttctacagcgccggcctgaagggccgcttcgaggaaggcaagcgcgccgacgaccacgtgctcaagagcgatgtctaccgcgtgctggaagtgcgcgacgggcacctgggcgagcgcgaggtgccgatgctcaatgcgctcaatgaagtgctgcgcgacgactacatcaaggacagcttgggcggcgtggcgcgctggaacaaggtcatcgaaaaggccggcatcgcattccgcctgaccgtgccgcacaaggccttcaatcgcaagatcggcacgctggccaatgtgcatgtctcgcccgagggccagctgatttccgaagcggaatggcaggctaacgaacgcaagtggctggccaccgacgaagaccgcgcctttgttgcctcgctgatgggccgcgtggtggagcccggcaagtacgccaactggatcgcgcctccggcggtgggcatcaaccgccagccgatggatttcgagtacgtgcgtttcaactgaaccagaagcacaggacaggccaggagccaccggagacacgccatgggcgcccccgacatcatcaagcagcacctgatcgatccggaaatctgcatccgctgcaatacctgcgaggacacctgtccgatcgacgccatcacccacgacgaccgcaactacgtggtcagggcggacgtgtgcaacggctgcaacgcctgcctgtcgccctgtccgaccggagccatcgacaactggcgcaccatgctgcgcggccaggcctacccgatcgaggcgcaactgctgtgggacgagttgccggccgaggtgccgctgccggaactggccgacctgggcgaggcgccgcaggcaaccctcggcaccggcacggcaagcggcgccgcacccgacgccgccatccagtccgtggaaaccagccgccacacctcgccgcgtgcgccgtggtcggcggcccatccctatgtgaacctgcatggcgtgcgcgcgccggtcacggcgaccgtggccggcaactaccggctgaccgcagaagacgcatccagcgacatccaccatatcgtgctggatttcggcacgcacttcttcccgatcctggaaggccagtcgatcggcatcgtgccgcccggcacggatgcgtcgggcaagccgcactacattcgcatgtactcggtggccagcccgcgcgacggcgagcgcccgggctacaacaacctggcgctgaccgtcaaacgggtcgaccaggaccacgatggcaagccggtgcggggcgtcgcgtccaactacctgtgcgacctggccaagggcgacagcgtacacgtggtgggcccgttcggatcgaccttcctgatgcccaaccatgccgaggccagcatcatgatgatctgcaccggcacgggctcagccccgatgcgcgccatgaccgagcgcatgcgccgcaacatggcgcacttcggcgggcgccggcagctgttcttcggtgcgcgcaacgccaacgaactgccctacttcggcccactgctgaagctgcccaaggatttcctcgacatccatttcgccttctcgcgcgatcccgccgcgccgcgccgctacgtgcaggacgcgatccgcgaagccgctgacagcgtcgccgcgctgctggccgatcccaacggccatgtctatatctgcggactgaagggcatggaggcaggcgtgctcgaggcattcgaagcggtgtgcgccggctccgggcacgcgtggcccgagatcgaggccgcaatgaaggcggagggccggcttcatatcgagacctactgacgctgccgtagtttactggtttttcagcaatcgcttcccttctgaaaggcatcacctataatatttctgaagaaacaggagtgatggcgatgcaatccaggcggattccggaaactgatcccgccggcggccccgaccccggcaccacgctgaccaaggcggtgatgcgcgccgccggcttcctcggcatcagccaggccgtggtggcaagcgtgctgggcatcagcacggcatcggtatcgcgcatggcatctggcggctatgtgctcgatgcgcaccgcaaggagtgggaattcggcgtgctgttcgtgcgcctgttccgatcgctcgatgccatcctgggccacggcgaccaggcccggctatggctgaccaatgaaaacctggcgctgggcggcaagccccttgaaatgatccgcacaacggaaggtctggtccgtgtcgttcactacctggacgccacccgcggtcgcatctgagcgcaggcagttcgcgctcacgctgtggcgggcggtggaggcccagcacgtcgtatccaccatgccgctggtcgacagcctggaagaacaggctgtgctggaagccgtgctcgacgccggcaaacccgcagtgcccgccgaggcacgccatctgcactacctgctgttcacccccttccgctatccgccctcgccctggggctcgcgctttcgcgccagccaggatccgggcgtgttctacggcgccaacgagatccgcaccgcctgcgccgaactcggctactggcgctggcgcttcctcaatgacagccccgcgctgccgcgcatcgacgcccgcgcgcagacgttgttcgaagtgcgcgtcgatacctggggcgtggcactggacacaccgccgttcgaccaggaccatgccatctggaccgatcccgaccaccacgagccctgccaggccttcgggcgcatcgcgcgcgaggccggcctaggcatgatccgttacacctccgtgcgcgatccccggcatggcccctgcggcgcggtgctgaccccgcacgcgttctcccacccggcgccgctggccaccaccacctggatgctgacggtgcgccgcgaccgcgtgatctggcagcgcgacgacctgcagcaacgcgacagcttcgagttcgaggccgcgctgtggcagcgcacaaccgatagcactggcacgggctgaacctctgccccgtgccggcgatctaatcgttatggcaggcggcgatgcgcaccaccggaaggtatttttaaacaggtgttgcattgcgcaaccagatgccatataatcttttcttcgacggacgcggggtggagcagttggcagctcgtcgggctcataacccgaaggtcgcaggttcaagtcctgcccccgcaaccaaccgcatgatgcgtatcatgcggcaccgtcaaagcagataaacccgcctctggcgggttttttgttttctgctgctccggcactggcaccccgatgctgccctccgtgcagcaccagactgcgttgaccgatggtgccccaccgccccaatcatgcctgccggccccctctgcgagggtgatacactttcgccattcctcccggacgcccctcatgaaattctgctcgaactgtggtcatgcggtcgtgttgcgcgtgcctgacggcgacaaccgcccgcgcagtgtttgcgacaactgcggcaccatccactacgtcaatccacgcaacgtcgttggcacgattccggtgtgggaagacaagatcctgctgtgcaagcgcgccatcgagccgcgctacggtttctggaccctgcctgcgggcttcatggagattggcgaaaccaccgcgcaggctgcctcgcgcgagacgctggaagaagccggcgcgcgcgtgcaggtcggagaactgttctcgatcctgaacgtgccgcatgtgcaccaggtgcatcttttctacctggccacgctggacgacctggatatcgcccccggcgaggaaagcctggaggtcaagctggtcgaagaggccgatgtgccctgggatgaactggcgttccccaccgtgatccacaccctgcgctgcttctttgccgaccgcgccgccggccggctgcaggacggcagcttccggctgcacagcctggatatcgacaagcccatgcgcccgctgaccagccgggccacggtcacgccctgagcggcgcggccgccgcgcatcgccctacggcgcagcccgcatgattgcctggctggacccgcaagacccgtttccgccggttgacgaggcgctcgggcccgattccgaagcccccggcctgctggcggccagccgcgacctgtcgccccagcggctgctgctggcgtaccgccagggcatcttcccgtggtattcgagcggccagccggtgctgtggtggagcaccgatccgcgcatggtgctggccccgccggcgctgcgcgtctcgctcaacctgcgcaagaccctgcgccgcgtgctgcgcgacgctgactgggagatccgcgtcgacgacgacttcctggcggtgatgcgcgcctgcgcgaccaccccgcgcgacggccaggacggcacctggatcaccgacgatatcattgccgcgtacggtacgctgcaccgcaacggcatggcccattcggtcgaaagctggtaccgcggcgaacgcgtgggcggcctgtatggggtggcgctggggcggatgttcttcggcgaatcgatgttcgcgcaccgcaccgatgcctcaaagatcgcactggcggcactgtgcgcgttcctcggcaatcacggcgtggcgatgatagactgccagcaggaaaccgaccacctggcctcgctgggtgcgcgcccgatcccccgcgcagagttcgtggcccatgtgcgggcggcgacggcgctgccggcgatcagtccgtggcggttcgacaaatcggtgctggagcgctgggccgggacgccagccgcgccggccggctgaaacctggcacgggacgccccgctgactgcgcgtccggccgcatcgtcccgcccggagccccctgagtcatgagcaagctgaaggaacttccgctctccgcgctgcagttctatgccacggcgccctacgcttgcagctatctcgacggccgcatggcacgctcccaggtcgccaccccggcgcacctgatcaatgccgacgtctattcacgcctggtgcgcgccggctttcgccgcagcggcatcttcacctaccggccgtattgcgacgaatgccacgcctgcacgccatgccgcgtggtggtggaccagttcgtgccggaccgctcgcagcgccgcgcctggagccgccaccagcacctgcaggcactggtggcaccgctgacctatgtcgaagagcattattcgctgtacctgctgtaccagtcgatgcgccacgccggcggcggcatggaccaggacagccgcgaccagtacgaacagttcctgctgcagagccgcgtcaactcgcgcctggtggaattccgcgaaccgccgggctcgcccgaggccgggcgcctgcgcatggtcagcatgatcgacgtgctcgacgacgggctgtcgtcggtctacaccttctacgatccgctcgaacgcaacgccagctacggcacctacaacatcctgtggcagatccgccagacgcgcgagctgggcctgccgcacctctacctgggctactggatcgccgacagccgcaagatggcctacaaggcacgcttccggccgctgcaggtgctgaccggcaaccactggcatgcgttcgaggacgaggccggggatgcggccagccccgcgcctgcatccaaccgggactagccgggtcgcggcatccggccgcgcaccgaccgggtatgcggcccagccgctacaatgcggggctggtattcactctgccctgccccccgtgctcaacgcgctctaccccctggttcgccccgccctgttctcgatggatgccgaggacgcccaccatttcacgctgaacaacctgctgcgcgcccatcgcatgggcctggcgggctgcatcggcaacaggattgccgacgacccgcgcacggtcatgggggtgcggttccccaacccggtcggcctggccgcggggctggataaggacggcgcctatatcgacgggctggccgcgttcggcttcggctttatcgaggtgggcacggtcacgccgcgcgcgcagccgggcaacccgcgcccgcgcatgttccggctgccgcaggcggatgcgctgatcaaccgcatgggcttcaacaatggcggcgtcgatgcctttgtcgccaatgtgcgggcctcgcgctggaaggccgagggcggcgtgctggggctgaacatcggcaagaacgccgatacgccgatcgagcgcgccaacgacgactacctctactgcctggaacgcgtctacccgcacgccagctacgtgacggtcaatatctcgtcgcccaacaccaagaacctgcgccagctgcaaggcgcgagcgagctggacagcctgctgtcgacgctgaaggatgcgcagcagcgcctggccgaccagcacaagcgctacgtgccgctggcgctgaagatcgcgccggacctggatgccgaccagatcggcaatatcggcgacgcgctggtgcggcacaagatcgacggcgtgatcgccaccaacaccaccatctcgcgcgaggcggtcaagggcctgccgcatgccgaggaagccggaggcctgtccggccgcccggtgttcgaggcctcgacccgggtggtgcgcgcgctgcacggcgtggtcggcgacgcggtgccgatcatcggcgtgggcggcatcttcggcggcgccgatgcgcgcgccaagatcgacgccggcgcgaagctggtgcaggtctacagcggcctgatctaccgcggcccggcgctggtgcgcgagtgcgccgcggcgctgcgcggctgagtccctcctgcgccaacgacacgcaaaccgccatggaaaccatccgactcggccgcagcgacctgcaggtctcgcgcatctgcctgggcaccatgaccttcggcgagcagaacaccgaggccgaaggccacagccagctcgactacgccttcgcgcgcggcatcaatttcatcgacacggccgagatgtacccggtcaagccgagggccggcacctacggccagaccgagcgcattgtcggcacctggctcaggcgccagccgcgcgaccgcgtggtgctcgccacgaaggtggccggcccgggccgcatgccgtggatccgcaatggcgacgacctgacgccggctggcatccgcgccgcggtggacgaatcgctgcgccggctacagaccgactatatcgacctgtaccagatccactggccggcgcggaatgcgccgatcttcgggcagctcagcttcgatcctgccaaggagcgcgagtgcacctcgatccaggcccagctcgaagtcatggacgaactggtgcgcgccggcaagatccgctacgtgggcgtgtcgaacgagaccccgtggggcgtggccgaattcgtgcgccttgccgggcagcacggcctgccgcgcatcgccaccgtccagaacccgtacaacctggtcaaccgcagcttcgagcagggactggatgaagcgtgcttccgtaccgatgtcagcctgctggtgtacagcccgctggcgttcgggcaactgaccggcaaatacctggcgggcgatgcggccaacccggtcttcaatgccgaggccaagggccggctgtcgcgcttccccgccgactggagcccgcgctacatgcgccccgagaccatggcggcctcggcccgctatgtcgaactggcgaaaagcgccggcctctcccctgccacgctggcgctagcctggtgctactcgcgctggttcgccgccagcaccatcgtcggcgccaccacgctggtccagctcgaggaaaacctcgacgcctggaacgcgcaattgcatgaagacctggtcgccgcaatcggggtaatccacaagcaaatcatgaatcccgcgcaataaaatgcgcctcgatggcggatagtgggcgtctggcagcatccgatgccccacttccgcatgatgactgtccatatcgtgcgcgggaagtggtatcctcgcaggcttatcgctgtcgcatccgacgcgcccgcgcacgctccctccagccgcaggaagccgccgcgcccgcccggaccggccccgtacgccagcatgcgcacggaccaggacggcggaccgaaccattcgcggccgtatccaatccagaaccgagtttcgggggagaacagacaatgaagtccatcaagggtctcgcagcaaccaagtccatcctgggcggcgccgtggcgctggcactgctgtacgggcccgccgtgcaggcccagaccgtcaaggtgctgtcgatcgtcgaccatcccgcgctggacgccatccgcgacggcgtgcgcgccgagctgaaggccgccggctatgacgccgacaagagcctgaagtgggaataccagagcgcccagggcaacaccggcaccgcggcgcagatcgcccgcaagttcgtcggcgacaacccgaacgccatcgttgccatcgccaccccgtcggcccaggccgtggttgccgccaccaagagcgtgccggtggtgtactcgggcgtgaccgatccggtcgccgcgcagctggtcaagagctggtcggcctcgggcaccaacgttaccggcgtgtcggacaagctgccgctggacaagcaggtcgcgctgatcaagcgcgtggtgcccaaggccaagaccgtgggcatggtctacaacccgggcgaagccaactcggtggtcgtggtcaaggaactgaaggagctgctggccaaggacggcctgacgctcaaggaagctgccgcgccgcgtaccgttgacatcggcccggccgccaagagcctgatcggcaaggtcgacgtgatctacaccaacaccgacaacaacgtggtgtcggcgtatgagtccctggtcaaggtcgccaacgaatccaagatcccgctggtggccgccgataccgacagcgtcaagcgtggcgccgtggccgcactgggcatcaactatggcgacctcggccaccagaccggcaaggtcgtggtgcgcatcctgaagggcgagaagccgggcgcgatcgcctcgcagaccagcgacaacctggagctcttcgtcaacacgggcgccgccgccaagcaaggcgtcacgctgtcgccggagctggtcaaggaagccaagacggtcatcaagtaagcaacagcgaagcactgccccctgccgccacacgacggcgggtgccccgtcgggcctatccggcccgacgggacagaacagggcgaggcggccggcagccccacacaggcgcgccggcccacccgccccgaaggcggcgccaaggcagccgccagcccctgcaacaggattcccccatgtccctcttttcccttctgggcgccctggagatcggcctgatcttcagcctggtggcgctcggggtgctgatctccttccgcatcctcaactttcccgacctgaccgttgatggcagctttccgctcggcggcgccgtcgccgcgacgctgatcgccgccggccaggacccgttcatggccactgccgttgcgatcgctgccggcgcgctggcaggcttcatcaccggctggctcaatgtgcgcctgaagatcatggacctgctcgccagtatcctgatgatgatcgcgctgtactcgatcaacctgcgcatcatgggccgccccaatgtgccgctgatcaccgagcccacgctgttcaccatcctgcagcccgaatggctgcctgactacgtgctgcgcccgctggtgctgctcgtggtggtggtggtggccaaggtcggcctggactggttcttcagctcgcagctgggcctggcgatgcgcgccaccggcgccaacccgcgcatggcccgctcgcagggcatccccaccggccgcgccacgctggccggcatggcactgtccaatgcgctggtggcactggccggcgcgctgttcgcgcagacccagggcggctccgatatctccatgggcatcggcaccatcgtgatcggcctggccgcggtgatcatcggcgaaaccatcctgccggcacgccgcctgatctggaccacgctggccgtggtgctgggcgccatcctgtaccgcttcttcatcgcgctggcgctgaacagcgacttcatcggcctcaaggcgcaggacctgaacctggtgaccgccgcgctggtgacgatcgcgctggtgctgccggcgacccgcaagaagctgttcgcccgcaagaacggaggtgcctgagatgctgcgcgcacaagacctgaaactcaccttcaacccgggcaccccgatcgagacccgcgccttgcgcggcctcagcctggagatcccgagcggccagttcgtggctgtgatcggctccaacggcgccggcaaatcgaccttcctgaacgcgatcagcggcgaccagatggtcgactcgggccgcatcaccatcgatgacaccgacgtcacgcgccagcccgcatgggaccgcgcccacctggtggcccgcgtgttccaggacccgatggccggcacctgcgaggcgctgacgatcgaggagaacatggccctggccatggcccgcggcagccgccgcggcttccgcccggcgctgaaccgcacctcgcgcgagctgttccgcgagaagctgcgcctgctcaacctgggcctggaaaaccgcctgaccgaccgcatcggcctgctctccggcggccagcgccaggcggtgagcctgctgatggcttcgctgcagccgtcgcgcatcctgctgctggacgagcacaccgccgcgctggacccgaagaccgcggccttcgtgctggagctgaccgcgcgcatcgtcgaggagagcaagctgaccacgatgatggtgacgcacagcatgcgccaggcgctggactatgggcagcgcacggtgatgctgcaccaggggcaggtggtgctggacgtgtcgggcgacaagcgcaagggcctggatgtgccggacctgctgaagatgtttgagcagacgcggcacgagcagctggatgatgatgcgctcttgctgggttgaagacggcgggcaatgaagacggggagccaggcggctcccctttttcatgccagtgcgcgacgcttcagtcgatagtgatatgccgctgccgaatcacgccggcccagcgcgcgctttccttctggatggtggtggcaagctgctgcggcgtgccgccggccgcttccatccccagcgttgccagcttttccttcagcgtcgcatcagccagcactgcatcaacatgctgactgagcttgcgcacgatctccgcgggcgtaccggccggggccatcagcgcataccacgacaacgcctcgaacttcggaaagccctgttcggcgatggtcggtacatcgggcagcaccgccgagcgcttggcgctggccacacccagcgggcgcagcttgccggccttgatatagggcagcgccgccgacatctgcgcgaacatcatcgtcacctggccgccgaccacatcggtcatggccgggctgatgcccttgtacggcacgtggttcagcttgacatgggcatccagctgcagcagttcgccggccaggtgcgcctggctgccggcgccgggcgaagcaaagctcagctcacccggcttctgcccggccagcttgagcagttccgccagcgatttgactggcgtggccgcattgaccaccagcacgttctcggcggtggccagcatcgccaccggcgccagatcggccggcttgtacggcaggttcggcatcagcgtggggttcaccgcgatattgccgaccggcaccagcgccagcgtatagccgtcgggcgcggccttggccaccatgtcgacgccgatggtgccggcagcgccggccttgttctccaccagcacgctctggccggtggccttggcgatgccttcgccaaccgcgcggccgagcacatcggcgggcccgccggcggcgaacggcaccacgatgcgcaccggcttggcggggtacccaggcggctgggccagcgcgggtgcggcagcgagccacggggcgcaggccgcgatgcaggcaagcatgcagcgcatggccatgcgtcgaaggacaggttttacggcgggcttcacggcagcttccacatcaggtttcacagcggtcttcatgacggtttcccctatttggcagtgatcaggcttggctcccccaccgcgccggcagtctagttatcgtgcttggccgtgcccggtccggcatcggtcagcgcaaaccccgcctggtccgcttcgcgtgcgagttcaggcagaacggcatagtcggccggttgcaccggcgcaaagcgcgccagccccagcatggacagcaacgcggtccccgttgcaccctcatgcagcgtcagcagcgcggcacgcacgtacgcgcactcgtgcgggtcggcctgcgccgaggcgaccagcggcgggatcggcgcggccggggtcacctccagcgttttcagccggcccgcgagcccgggttcgaagcggcgcagcaggtccagcacatagctatcgaccactcccgcctcggcgtccccgccgatgaccgcgtcaatgacctcgcgcggtgtcggcgtgggtgcggcggcaggccggtacagcgcacgggtgccggccggcgccagccgcatcaggtgatggcgcggcgcgttgtagcccgagttggactcaggcagcatgcatgccagccgagcgccgaaggtctgcgccagcgcctgcaccggcgcgtcagcacgcacgatgaattcgctgaagtagaccgggcgcccgccgtagcgcgccagcgccggcaccggcgcggccagcaattgcggcgttaccggcgcgctggcatagggatagccgcacatgaatacgcagccgcagtccggccgcgcccacaacgcgttgaccggggccggcgcgggatgttcgacatacggcaggtccacgcctgcgcggtcggccacgtgcaccaacagcgctcgccacgcctgctccaccggcgcgctgaccgagtacatgcgggcgttggcgatcatgcgtagagcaacctctggcccaggccgcggctctcggccttcttcaggatggcgtggcccagcgcgatatcgctcagcgacaggccgcggtgccagaacaggttggtctcgtcgtcgctctggcggcccggcttgcgcccggcgacgatctcgcccagctcggcatagagcgtctgttccgacagcttgccggcttccacatgcgcgcgcagcgagccgaacatgccgcccttgcactggccccagtcatccaccaccatcctggtcatgatgtcggtcagcgacagctcgaccgcgctcatggtgccgtacggcacgacaaaggcgccgggcttgatccactcggtcttcagcatcggcgtcggccgctccaggcgcgaagcctcgatcacgatatcggcaccgcgcacgcacgactcccagtcttcggtgacgacgatcttcttgcccagatcgcgctccagcctcgcggcgaaggcattgcggctttcggggcggcgcgagtgcacgcggatctcgtcgaagtcgaacaggctgtcgagcaggcgcacattccagtaggaggtgccgcgcgcgccgatatggcccagcaccttgctgttgcggcgcgccagatgcttggcgccgagcgcggtcagcgcgccggtgcgggcatcggtaatgaaggtggcatcgatcatcgccaccggcatgccggtgcgcggatcgaacaggttgagcatcgccatttccgatggcagcccgagcttgtagttgtcgacgaagtcgccgacgatcttgacgcctgccagccccagcggcgccacatagccgcgcaacacgttgaagtggccgttgaaggcggggtcgggaatcaggtgcacgcgtggctcgatcacggtctggccgttgccctgcgccaccagcgcctgctcgaccgcgtcgaggatctcggcgtcggtcatttccaggcgcgcgatgtccttgccgttgatgtaggtgagatggatgtcgctcatacagtctcctgcctccgggatggaaaaccctgcacatcgctggtgcgtgccctgcggcgcgcggcgtgtgtcgatggagttcagtgtaggtatggcgccattgactgtcatatgcttatatgtccgccagccttaacatcaggttaatgccatgaaaatgaacctgcgccagatcgaggtgttccgcgcggtcatgctgaccggctcgatcagcggtgcgtccaagctgctgtacgtgtcgcagccggccatcagccggctgatgtcgcacaccgagcaacgcctcggcctggagttattccgccgcaccaaggggcgcctctaccctacgccggaagcgcggcgcctgctgggcgaggtgaatgcggtctacgaagggatcgagcgcgtcaacgagatcgccgaggacctcgcggccaaccgcaccggcagcctgcgcctcacatgcagccccaacctgggccagaccgtgctgccgcgcgccatcgcgagctttcgcgccgcgcacccggcggtgcgcgtggtggtgcgaacgcagatccccggcaatatgctgcgcgcgttactgtcgggacaggtggacctggccgtgtcgaacatgccgctggtgcaccccaacctggaggcgcgcctgctggtaaagaacgcgatcgtggcactggtgccggtggatcaccggctggccacgcggacttgggtgcgcccggccgagctggtcggagaagacctgatcggctacggaccggacgtcccgttcggattgctggtccgcgagatgttcggcagcgagggcaaccagcccgatatgcgggtgcaggtggagcaggcgcacgtggcgcgcgcgctggcgcaggccggcgccggcatcgcgctggtcgatgccatgaccgtgttcggccagagctggcccaatatcgttgcggtgccgatacgcaccaaggtcaatgcctcggtgcagatcttccatgtgcagaccgaaccgctgtcgcggctgtcgctggaattcgtggatacgctgacggggatgatgaagggctagtggttctttactgaagcctcagaccgttgccgccttgtccagccagcgcgtcagctggtccgtcaccgccgaactcgaaaacgagcagctatcctgcgcgaacactgccgacatctcgagccggcgcagcagctcttccatcgcctgcccgtagaccggcggcagcgccagcccggtaccggcttcgcgccatgcgcgcaccaggtcgccagcgggcatcgatccggccaggtgctggtccagtgcggcacgcatgcgcgccagtgcttcgttgttggcggcgctcataaacgtgccctcctttccttgtacagttcgcggaacgtgcggcccgacggggccggcatgtcgcgggtttcggtccagcccttgcccgccatcggcaggctggcaatcagcttgttgctgccacccatgcggcccagcagccaggcgccgatgcgggtggcaaaggcatacagctccgggcgtttggcgacgtagccccacgcctgcagcgcgaagcgctcctgccatgggcgcagcccgcgctccatctgcttctcgcgcagcttgcgcagcaggtccgacagcgggatcgatgccgggcacacgcggttgcactcgccgcacatggtcgccgcctgcggcaggtcgatcgcattggccaggccgacgtagctgggcgtcagcacgctgcccatcgggcccggatagacccagccatacgcgtggccgccgatcttctggtagaccggacagtggttcatgcaggcgccgcagcggatgcagcgcagcatctcctggaagtcgccgccgatcagcccggtgcggccgccatcgaccagcacgaagtacatgtgctcggggccgtcgcgctcgccctcggcgcgcgggccggtcagcagcgagaagtagttcgagatggcctggccggtggccgagcgcggcagcaggcgcatcaccgtggccaggtcttccagcgtcggcagcaccttttcgatgccggtcacggccacgtgcacgcgcggcatcaccgtgcacatgccttcgttgccctcgttggtgaccaccgccaccgagccggtctcggcaatgatgaagttgccgccggtgacgcccatgtcagcgctcaggaactcggggcgcagcacttcgcgcgcctcgcgcgtcatctccgggatctcggtcagccgcggcttgtggtggaccctggcgaacaggtcggcgatctcgtccttgtccttgtgcaccaccggcgcaatgatgtgcgacggcggttccgagtcgttgatctgcaggatgtattcgcccaggtcggtctcgatgctctgcacgcccatctcgcccagcacctggttcagccgcatttcctcggtcaccatggacttgctcttgatgaccttcttcacgccatgcttctgcgcgatctcggccaccaggcgcgcggcatcggcagtggtctcggcaaacagcaccgtggcgccgcgcttcgtcgcgttctcttcgaaggtggccagccagacgtcgaggttttccagcgcgcggtcgcggcgctctttcagggcctcgcgcgtggcgtcgaagtcgatatcgcggatcgcgtcggcgcgggccgtgacgaacttggtcgaaagcttcttcaggttctgctgcaggcgctggtcggccagcttctggccggcgcgcgccttgaattccatgctgtggacttgcatcgtggcgattccccggatttcagcggatgtcaggcgtcgcccgccagcacctgggcgatatgcagcacgcgcgtgctgctgtcgccggtgcggcgcaggcggccttcgatattgaggatgcagcccaggtcgcccagcaccaccgtatcggcgccgctggccttgatgttggcgcacttctcgtcgacgatcgcggtcgagatattgccgtacttgaccgagaaggtgccgccaaaaccgcagcaggcttcgcaatccttcatttcggtcagctgcacgcccggcagccgcgacaacagctcgcgcggctgctgcttgacgcccagctcgcgcaggccggaacaggaatcgtgataggtgacatggcccgagaacgacgacggcagcgtctgcaccctggccacgttgaccaggaaatccgtcagctcgaacacgcgttcgcgcaggcgctcgtagcggccgttgagttcgggatcgttgtgcagcaggtcgccgtagtgctggcggatcatgccgccgcagctgcccgacggcaccacgatgtagtcgaacatctcgaactcgcgcaggaatttctccgccaggtcgcgcgacaccgcgcgctcgcccgagttgtaggccggctggccgcagcaggtctgcgcctcgggcaccatgacctcgtagccggcggcttccagcagcttgagcaccgaaaacccgatttccggacgcatcaggtccaccagacaggtggcgaacagaccaactcgcattgtcgacttctccagacccgaaaccccgcaattatgcgcgtttgcgtcgcgcgtggcgcacaaaccgttcagcaagggcgtgaatccggtgcaatgcacatcacttccggtgagcaacatcaccagccgtttcttacggtaatgtcatttcacctattgaaattttcacaatgtgagatagaatcgggcagacgcttaaaaatgccgcaagcaacatttctcttttttccatctatgtccgacgcagacaagtcacccggcaagacgtccatccaggtcatcgagcgcatgatgaccctgctggacgcgctcgcgcagcacgccgacccggtcagcctgaaagagctgtcactggccacggggctgcatccctccaccgcccaccgcatcctcaacgacatggtggcctgccgctttgtcgaccgttccgatcccggcagctaccggctcggcatgcggctgctggaactgggcaacctggtcaaggcacgcctgtccgtgcgcgacgcggcgctggcgccgatgcgcgcgctgcaccgcgtcaccggccagaccgtgaacctgtcggtgcgccagggcgacgagatcgtctacatcgagcgcgcctacagcgagcgctcgggcatgcaggtggtgcgcgccatcggcggccgcgcgccgctgcacctgacctcggtcggcaagctgttcctggcagcggacgaagccgcgcgcgtacgcaactacgccacccgcaccgggctggccggacatacccgcacctcgatcaccgacctgaccaagctcgagcgggagctcagctgggtgcgctccaacggctatgcgcgcgacaacgaagagctggaactgggcgtgcgctgcattgccgccggcatctatgacgactcgcgccggctggtggccgggctgtcgctgtcggcaccggccgaccggctgcaggacagctggctgcaaaacctgaaggacacggcgctgcagatctcgcgcggcatgggctacgtgaccgaagccgccgcctgaaggccgaatcgccagccgccgccaacgcgcgggctgccatcatggcagtccgcgcgttttgctttgggactgcggtcgtctcaattccatggtttacccttagttttcagataaccagcaaaccatataattggcacccatgcgaacccgtgccgtcaccctcaccgaacaggtcacccgccagctgcgcgccgatatcgaaagcggcgcctacccggtcggcagccggttgccgaccggcaggcagctgtccgagcagtacggcgtcagcgccgcggtgatccgcgaagtcaccgagcacctgcgttcgcagggcttcgtcgagtcacgccagggcgtcggctgcacggtgcgctcgcgtaccggctcggcgggattccagctgccgcgcgaacccgatatcgacgccagcgggctggccgacctgtacgacctgcgcatcgacctggaaggcgccgccgcagcgctggccgccgtgcgccgcaccgatgaggacgtggccgcactgagtgcactgctgcagcggctgcgcgctcatctctatgacccgcagccggccgccgatatcgacgccgcgttccatatcggcattgccgccgccacgcacaacccctactaccgccagctgctgcagtacctgaacctgcagctgcaccaggccgtggccaccgcgcgcgccaatacgctgcgccaggcaggcctggccgagaccgtgcatgccgagcatgaagcgatcgtcgatgccatccgccgtggcgatgccgcggcagcccgcgcggccgcggtgacacacctgcaatgcgcggcgcgccggcttggcttggtgctgcgcacgcgcgccgatgaagcgtcgacagcgcgcgtagccagctccccttccctttcctgagacgacaccaccatcatgcaaaccggccaattcgcccagcggctcaccgaggccctcggcgccgacaccgtcctgaccaaccccgacgacatcgccccgtggctgtccgactggcgcggcatctaccgcggccaggcccaggccgtgctgcggccgcgcaccgtggacgaagtctcgcgcgccctggcgttgtgccagcaggccgcggtgccggtggtgccgcgcggcggcaataccggcctgtgcggcggcgccacgcccgatgcgcaggcgcagaacgtggtgctgagcctggaccgcatgaacgcggtgcgctcgctcgacaccatcgccaacaccatggttgcagaggccggctgcatcctcggcaacctgcgccgcgcggcgcaagacgccaaccggctgctgccgctgtcgctggccgccgaagactcatgccagatcggcggcaaccttgcgaccaatgccggcggcgtgaacgtggtgcgctatggcatggcgcgcgaactggtgctgggcgtggaagcggtgctgcccaacggcgaggtcttccatggcctgcgcacgctgcgcaaggacaataccggctatgacctgaagcagctgctggtcggctccgaaggtacgctcggcgtaatcaccgcggccgcgctgcggctgttcccgcgtaccgacacgcgcagtgtggtgctggcggcggtggcctcgccggcgcagtcgctggcactctatgaactgctgtttgaacaatgcggcgcgcgcctgcaggcgttcgaattctttaccggcgattgcctggacttggtgctcacgcacgcagagggcgtgcaggagccgttcgcgcaacgctaccccgcctacgtattggtggaactggccgacaccacggacgaagatgcgctgaacgcgctgctcgaacgcgttatcggcgaagcgctggagcgcgagctgtgcctcgatgcagccgtgtctgcctcgctcgcacaattgcaggcgctgtggaaactgcgcgaggaaatctccgaggcgcagcgcgccgacggcccgcacctgaagcacgacatctcgctcccgatcgagcagattccggccttcatgacctcgatggaaacgcggctgcgtgggctcgatcccgccatccggccctttatcttcgggcacttcggcgacggcaacctgcactacaacctgtcgcgcccggccggcgcgcccaaggactgggcggccacgcaaggcgatgcggtgaccgacgcggtgctggacgaagtgatgcgctacggcggcagcatcagcgccgagcatggcatcggccagctcaagcgccatgccttcctgaccatgaaggacccgctggaactgcggctgatgcgcgagatcaaggccgtgttcgacccggccgggatcatgaacccaggcaagctgctctgacggccgcggccgccagaacgaaaaacgcgccgtggcacggcgcgttttttcccggtcaggcgttccgtatcagatgccgcgcgactgttgcgaggccaggatcgcgtgcgcgccgcccggagcctgcgtcaggttcggcgacgacgggaaaccacgctgcggcgacgatggcgacggcgcatgctccagccagtccttgacgcggttggcatcggcaaagcgcgacagcttgccggccgagtccaggaacaccatcaccacgttgcggccctggaccttggcctgcatcaccaggcactggccggcctcggagataaagccggtcttctgcaggccgatctcccagttgccgccgcgcaccaggcggttagtgctgacgtagtgctgggtgcggcccagcacgttgacctcatgctcggtctgcgtcgagaactcgcggatggtcgggttgcgatacgccgcgttgaccatgcgcaccaggtccgtcgcgctcgacacattgctgctcgacagcccgctggaatcgacgaagtggctgtcgttcatgcccagctcgcgggccttgcggttcatcgcctggacaaaggccggcaggccgcccgggtagttgcggcccagcgccgacgcggcgcggttctcggacgacatcagcgccagcagcagcaattcctggcgcgtcagctgcgtaccaaagcgcaggcgcgagccgctgtgcttttcggtgtcgcggtcttcctcggagatggtcagcacttcgtccatcggcaggcgggcgtccatcaccaccagcgcggtcatcagcttggtgatcgaagcgatcggcagcaccgcactggcgttcttctggaacagcacctcgttggaattctggtccatcaccagtgccacgctggagcgcagtgccagcgcgtcgtcagtgtcacgcaagcccatggcttcgcccagcgacggcttggccggggtgaaggcggcgcgcacgggtgcggcacgctgggctacgacggtatggcgcttgccatttttcagcaccaccactttgcgtgtgctgcttgcttcgcgcttggcgaccttgccgctacgcgagctcttggcaacaatcttcgaagcaccctttttctcggcgttaaccgattttacctgctttttcgacgttttttgggtagttgcggacttggtggccgcttcggccacaggtgccgcgaccatcgacaccgataccaggaccgcggtggcaacagcggacaggggtgcggagccgaagaatctggaaaaaatggaatcagaccggaacatgattcgttcagcgcataggaatggcgctagtgtaggaaagaaagaaattgttagcaagattaaagacttacagacgctccttaaagttcgatttgcaaacatttccacattgcggaaaaagcaaccaaaaggtcacgtttgcatgcgaaccgcctctggcttgccccaggcgtacccgggttcaccttgctgccccttggaacactcccagccaatacacggacgtcgtcttgtatatcggcactcatcgttacacattgatacaaacttttctcaaactttgctatgagaggaaacgcgcgaacccgctgaccggctcacgttccgtggtcagctggttctcgatcgcttccgggtcggcaaaacccagtgacatgccgcataccaccatttcctccggtggcagccgcaggtggctgccaataatcttgtggaactgcgtgaacgccgcctgcggacaggtatcaagcccgcgcgcccgggcggcgaccatgatgctttgcaggaacatgccgtagtccagccagctgccctgctccatgatgcggtcgatggtgaagatcatccccaccggcgcatcgaagaaacggaaattgcgcgcgtgctgctcatgcatgcgcgccttgtcttcgcggctgatctcaagcagtccgtacaggtcccagcccaccttgcgccgccgcgacaagtaggggtcggcccactcgcgcgggtagtacggatactcttccaggtacttgctgtcgcgctcggggtcttcgtaggcgcccagcacatcggcgcacagcttggccttcgcctcgccggacagcacatagacgcgccacggctgcgtattggtgcccgacggcgcacggctggctacggccaggatttcctcgacggtccggcgcggcacctgcgtatcgagaaaggcccgcaccgaacgccgcgtcaggatcgcgcgatccacgcagtccacggcatcctgcgaaccgaattgcacctcgtgggacatcttgttcatctcctgttgccccgttcctacccttgcccgcccgtcaccgcgtcggccatcaccaacggcagcagcgcctcgcgcagcggctccggcaacggcaccggccggcgcgtggcgcgatcgacatagacgtggatgaaatgcccctgcgcggcggcagtctcgttgtcgccgctgaacagcccgacctcatagcgcacgctcgacgtgcccagtcttgccacgcgcaggccggccaccacggtctcgggaaagctcagcgacgagaagtagttgcactgcgtctcgatcaccagcccgatcgtgtcgcccgacgtgacatcgagcacgccctgccggatcaggtaggtattcaccacggtatcaaagtaactgtagtagacaacgttgttaacgtggccatagacatcgttatccatccaacgcgtggtgatcggctggaagtacggataggcactgcgcgactcggcttgcggtttcatgagacgtggacgggacaggatgggataggaatattctgaagtagccgcatacgcgacactaccggcggatgacaagtgcgacaccaagcgccgcgagcaccatgccggcagcggccagcggcggaaagcgctcaccgaagagcagccacgccgtcaccgcggtagtgggcggcgtcaggtacatcaggctcgacaccttggtggccgcgccccgccggatcagcaggaacagcagcgagatggcgccgatcgacagcgccaccaccgaccacgccatggcaccaagcatcgcggcactccactgcaccgcgcgggtctcgaacaggaacatgaacggcacgcacgcaagtgccgccgcggcgaactggatcaccgagcccatgcgcaggtcgaacaccgggcagaagtgcttctggtagaccgtgccgacggtgatgctgagcaaggcgccacccgccagtgccaggcttgccggcgtgagtccgctggcacccagcttgttggccaccaccagcgccacgccggcgatgccgagcagcaggcccagccacgcgcgcgcgccgatgcgctcacccatgcgcgtggcgatcagcgcggtcaggatcggctgcatgccgacgatcagcgccgatacgccggcaggcatgccaagcttgatcgcagcccagacgccacccaggtagcccgtctgcagcaacagccccgctacggcgatatggccgaccgcggaccagtccgtttgcgccttgcccggcaggcgcggcagcggcacgcgcgccagcagcacgaatggcaccatcagcaccaccacgccggcaaagcgcaggaacaggaaggtcatcggctccgcgtacggcatgccgtatttggcaacgataaagccggtgctccagatcagcacgaacagccacggcatcgacgccacccacagcgtggcgcgggcgcttgacgctgctgcgccgccttgctccatcacgccgctcatgtggccagcagcgcctgtgcatggcgcgcgtgatattgtgcggccaggcttacggtctgcgcgtggaccgcaaccgtgtcctcgatctggttgccgtagccgcccgccatcgccaccgccaccggcaactggcgtgcatgcgcggcatcgaacaccagccggtcgcgccgtgccaggcccgccaaggtcagcctgagccgcccgaggcgatcgccctcatgcggatcggcgccggccaggtagatgatcagctcgggatcgaagcggctgaacagcgtgtccagcgccgcctgcagcgcctgcgcataggtatcgtcgtcgcagccgtccggcaggccgacgtccaggtcgctggcctctttgcggaacggatagttcttctcgccatgcagcgacaacgtgaacacggacggatcgccttgcaggatcgacgcggtgccgttgccctggtgcacatccaggtcgaccacggccacgcggcgcacggcgccatcgcgctgcagcacgcgcgccgcaatcgcggcatcgttgaacacgcagaagccgccgcccttgtcggcatacgcatggtgggtgccgcccgccaggttcacggcaatgccttcgcgcagcgccgtccggcaggcctcgatggtggcgcctgcggagcgccgcgagcgttccaccatggcctcggaccacgggaagccgatctcgcgctggcgcgccgcgtcgagcgtgccggctgacgcggcctgcacgtacccgggcgtgtgcgccagcaacaaggcatcgtcgcccgcgcgcggcgcctcaaccaggcgcagccccggcacctgcgccgcgacggcatcgcgcagcatgctgtacttgcgcatcgggaaacggtgcccgggtggcagtggcagcacaaaatggtcggcatagaaagcgagcatggaagtggcctgggcggttctgttcacgtctttgttagttcccggcgcggccatccgtgcgggcgcgggcaatccgcgatggtagcacccctgcatggccctcgccggagcgccccggagtggcgtcacagccgctcccgtgtatcgccagcaacgttgtttgtgcattgcacaaaatccacttgacattggatctggcgcccctaaaataggaattgttgcggcgcaccaaataagaaatgcgccttgacccacccacacgcctgggctggccgaatcgggcacaacaccgtcacggccctgacatctaggcggcttaatttgctagaccttgaagttcaccactggagaccagcaatgatcctcaccccggaacaagttgcagcagcgcaaaaggccaacctcgaaacgctgttcggcctgaccaccaaggcgtttgaaggcgtcgaaaagctcgtcgagctgaacctgcaggtcgtcaagacttcgttcgcagaaggcgttgacaacgccaagaaggcgctgtcggccaaggacgcacaggaactgctggccatccaggccgcagccgtgcagccggttgccgaaaagaccctggcctacacccgccacctgtatgaaatcgcttcggaaacccagagcgagttcaccaaggtagccgaggctcaactggccgaaggctcgaagaacgtgcaagcgctggtcgagaacctcgccaagaacgccccggccggttcggaatcgaccgtggccatcgtgaagtcggcgatctccgctgccaacaacgcctacgagtcggtgcagaaggcgaccaagcaagcggtcgaaatcgctgaaaccaacttccaggctgcggctacggctgccaccaaggctgcccagcaagccagcgccacggcccgtacggccacggcaaagaagacgacggctgcctgataactgcctgcgttgaagatggaccggctgcggccggtccgttggcaaagcatatcgacgcctggcgtttgcggtgtgttttgccaacgatgaaggtagtgccctgactgagttgcatcggtgctgccttgtccgccgatgtctcctcggtaccgcggtctccttgtccaaaggtatcgttaaacccgacctctacaggtcgggctttttttttgctcttcacctttccatcaggttggtcccggtgaacagcggccgtgggccccgagcatgcatgccggcctattctccgatgcgcacaggaattcgccgccgcccgaactgacgctcaaaattcccgaaacgtcccgcaatctgtgcaaagcagtccgggcaagttcccgtgggagtcaggcgatagctttcgatcgcgtgccagtcgcgcacgatgagctgcgcgcggcaagcggggcaatgggtggtggcaccggcggtgtcgtgcacgttgccggtgtagacgtaatgcagtccctccgccagcgcgtgcttgcgggcgcgcgcaagggtggaacatggtgtcggcggcacgtcgcgcatcttgtagtccggatggaatgcggtgaagtgcagcggcacgtcgggaccaagctccctggcgatccaccgggcctcggcgcgaatctcgtcatcgctgtcgttcttgccgggaatgagcagcgtcgtgatctcgagccagacatcggtttcgtgcttcaggtactggagcgtctccagtaccggctgcaggtgcgccccggtgaaggcaacatagaacgcgtcgctgaagcctttcaggtcgacgtttgccgcatccatcctggcgtagaaatcacgccgcgcctcggcgcccatatatcctgcggtcaccgccaccgtcctgatgcccagttggtggcaggcatcggctacgtccatggcgtactcggcgaagatcaccgggtcgttgtaggtgaaggccacgcttttgcaaccgtgcgccgccgccgatgcggcgatcgcttcgggcatggccgcatcggccagggtctccatctcgcgcgatttactgatatcccagttctggcagaacttgcaggccagattgcagccggctgtgccgaacgacaggacggcggagcccgggtagaagtggttgagcggcttcttttcgatcgggtcgatgcagaagcccgacgagcggccataggcggtcagcaccatccgatcgccgacccgctggcgcacgaagcaagcgccgcgctgctcgccatgcaggcggcagtggcgcgggcacaggtcgcattgcatgcggccgtcatccaggaaatgccagtagcggccggaatagctccctgaaccgggcacatccttcatgaatggtccttgtgcggcttgctgatcacggttaccgacaatacatccaggtcgaagaacgggctgtcagccggaggcgggggcaatccggcaccccatccggcgatggcatgcttgatgtactctgccatctgctcgtcggcaacgtccctgggctggtcgatcatcacgacatagcggcgagtgctcatggcagatcctttatggcgcccatgacaggcaaccatggtggcatcacgaacgtatccggtgtcatcaatgccggcgaccccattcacgcgacgtctagcgatagaccagcaccggaatcttgctgtgggtcagtaccttcagggtttcgctgccgatcaacagcgccttcacaccccggcgcccatgagacgccatgacaatcaggtcacaatcgttttcttctgcagccttgatgatggcatcgtagggatgatcgtcgaccacgctgctggtgtcgcagggcacgcctgccgcggcggcctctcgcgcgatgccgtcgaggtatttcgatgcgtcctcgaggacagcctcttcgaactgctctcgcgtgtcggtgagcatttcggtgtggtaagtcgtgacgtggaaatccgggcaggcgcgcagcgccgtaatgctggcctgcgtctcctgcgcgaactccagtgccttgcgaaaggccgcttcggccagagcggagccatctaccgcaacaagaagatgcctgaacacgtcgtgcctccttgtcagctgaacggtagccaccgggggccaccggatcccgccagcagacatccggcagcgatcggccgcgcgcgaatatgcagcgccggcctcggtcgccttggggtgcatggcggctgaattcagtataggcagcgaaggtcttgcaccgctcctgtcgcaatctgcaccttggctgccgacgcgagcggtactggcaggcagacctcgcggacgccggcaaattctggcggttaattgcataattggcaatgaaaaagcccgcctgggcaggcgggctttctcgcttgcagcgaacggcgctcagcgcttgcgcggcggcggcacgtcagtacacgtgccttcatagatctccgccgccatgccgatcgattcacccagcgtcgggtgcggatggatggtcttgccgatatccaccgcatcggcgcccatctcgatcgccaggcagacctcgctgatcaggtcgcctgcatgcgtgccgacgatgccgccgccgatcacgcgatgggtttcctcgtcgaagatcagcttggtgaagccttcgtcgcggccgttggcgatggcgcggcccgatgccgcccaggggaacacgcccttgctgtacttgatccccttctccttgcactcgtcttcggtcaggccggcccaggccacttccggatcggtgaaggccaccgacgggatctgcttggcatcgaagtaagccttctcgccatgcgcggcctcagcggcaacgtgggcttcatgcaccgccttgtgcgccagcatcggctggccgacgatatcgccgatcgcaaagatatgcggcacattggtgcgcatctgcttgtcgacgttgataaagccgcgctcgctcacggccacgccggccttctctgcgctgatgcgcttgccgttgggcgagcggcccaccgacaccagcaccaggtcgtagcgctgtggctcggccggcgcggcctcgccttcgaacttgacgtagatgccgtccggtttggcttccacgccgacggttttggtcttcagcatgaccttgccgaagcggtccttgttcttcttttcccagaccttgaccaggtcgcggtcagcaccgttcatcaggccgtcgagcatttccacgacatcgatgtcggcacccagcgtgctgtacaccgtggccatttccaggccgatgatgccgccgccgatgaccagcatcttgttgggcacttcgggcagctccagcgcgccggtcgagtcgacgatgcgcggatcttccgggatgaacggcagtttcaccgcctggctgccggcagcgatgatggccttctcgaagcggatcacggtcttcttgccggtgctgcgcttgccctcgccttcggtcagctcgacctccatgtgatgcgggtcgaggaagttgccgatgccgcgcaccacctgcaccttgcgcgccttggccatgccggccaggccgccggtgagcttgccgaccacctggttcttgtagtggcgcaggccgtccaggtcgatcttggcttcgccgaacaggatgccgtgggcggccagcgccttggcttcgtcgatcacggcggcgttgtgcagcagcgccttggacgggatgcagcccacgttcaggcagacgccgccaagcgtgctgtagcgctccaccagcacggtattcatgcccaggtctgcggcgcggaaggcggccgagtagccgccggggccggcgcccagcaccagcatctcgcactggatatcggcgccaccgctgtggctggcggcagcaggagccggtgccggagccgccgccgcgggtgcgggagcctgcgccggtgccggagcttgcgcgggcgccggggcggccgcggcctgctgggcctcgatggtgcagatcaccgcgccctggccgaccttgtcgccgaccttgaccttgacctcaaccaccttgccggcggccgacgacggcacgtccatgctggccttgtcggattccagcacgatcagggactgttccacctcgaccgtgtcgccggccttgaccagcacctcgatcacttccaccgcgtcgaaatcgccgatatccggcaccttgacttcgatcacactcatgtttgctcctctatgcgcgcccgcctctcggcttcagggcgcgccgtcgttgttggttgccgcgctgtcgggtgccgtactgccggttgccggattgccgcccgtggcaccgccagccggcggtgccggcgcggtgtcaccctcgtgcagccgcacggtgtgcacctcgatcggccccgccgaactcttgtcgaactccacgcccgcatcgacgccgatgcgcgcgatctcgcccgcatccaggtccggccggtcatagaccgcatgcatcgcgcccagcgcgtagttgcggcccgagccgataccccagaagcggtcgaacgaaaacacctcgcggtacgagtagacgccgaagatgcccgccggattggcgatcaggcatacgatctgcgacgactcgtagggatcgtcctcgtcttccttggtgttgacgaagtagtccgacttcagcttctcatgcaccttcaggaaggtgcggaacacgtcatcacgcgagcccagccggcactcttcgccaagccccgccagcagcgtgcgcatgaccgggaagtgcgcggtggtcccggccagcgcgatgaagccgtcgcctaccgggaacaccttctggttgcgctcgtaggcgcgcgacaggcgcgtgtcgccaaaggtgaccagcgcatctgccgcgatggccacctcggcgcccttcctcacgaccacgcaggtagtcatggctcgctcccggttgcgcgtggtgcgccgggcaggccaggccgtcggcctgcccgcccggcgcaaccccgcttacagcaggatgcggcggaaatccgccagcagttgcccgaagtacgtgttgaagcgcgccgcttcggcaccgtcgatgacgcggtggtcccacgacagcgacagcggcagcgtcaggcgcggggcgaactgcttgccgtcccacaccggcttctggtacgacttgcacacgcccatgatggccacttccggcgcgttgatgatcggcgtgaagtatgtgccgccgaggccgcccagcgaagagatcgagaagcagccgccctgcatctggtccggcttgagcttgccgtcgcgggccagcttggcgagctcgctcatttcctggctgatctccagcacgcccttcttgtcggcgtccttgatcaccggcacgaccaggccgttcggggtgtcggcggcaaaaccgatgttgaagtacttcttcagcacgaggttgtcaccatcgagcgacgcgttgaagttcgggaacttcttcagcgccgccaccgtggccttgatcatgaacgccagcatcgtcaccttgatgccggacttctcgttttccttgttcagctgcaggcggaaggcttccagctcggtgatgtccgcttcgtcatggttggtgacgtgcgggatcatgacccagttgcggtgcaggttggcacccgagatcttcttgatgcgcgacagggccttgctttcgacctcgccgaagcgggtgaaatcgaccttcggccacggcagcaggccgagctcgccaccaccggcgccagccgcggcggcctgtgcgggcgcggcggcctggccgctcatcacgcccttgacgtagccctgcacgtcttcctgggtgatacggcccttggggccggtgcccggcacgcgcgacacgtccacgcccagctcgcgtgcgaacttgcgcaccgaggggctggcgtgggcggccttgccggttacgccagcggcggccggcgcggcagcaggtgctgcggccggtgccggggcggcggctgcgggggccggtgccggtgcgggcgcgctggcagccggagccggtgccgcggcggcagctgccggggcggctgctgcggcggcgccttccaggatcagcagcagcgtgccttcggcgacgttgtcaccgaccttgaccttgacttccttgaccacgccgccttgcggcgacggcacgtccatggtggccttgtcggactccagcgtcaccacggcgtcttcggcgttgatggtgtcgcccgccttgacgtggacttcgatgaccggcacggcgtcgtagtcgccgatatcgggcaccttgacttcgatggtgccgccaccgccagcggccggggccgcggctggggctgctgcgggggcaggagccggtgcgggggctgcggcggccggcgccggtgctgcggcagcaggggcaggtgcggcggcgggctcgttggccgcctccagcatcaccagcaccgagccttcggacacgttgtcgcccaccttgatgcggacgtccttgaccacgccggcctgcggcgagggcacgtccatggtggccttgtccgattccagcgtcaccagcgcgtcttccgcgttgatgctgtcgccgggtttcacatgcacttcgatgacgggaacggcgtcatagtcgccgatatccggcaccttgatttcaatcgcttgactcattcagtgtctcctgggcaggccggcacgcgcgacatccgcaagcggcgagattaccttcgccgcccgcttctgtcacgccgccatgccgcaaggcgccgtccgggctctggccggggcgcccgcggcacggcgttgccgtactgcgggggttggtgctggctgccggatcagaccgacatcgggttgggcttgttcgggtcgaggttgtacttcttgatggcctcggcaaccttgtcgcggccgatcgcaccctcgtcggccagcgccttgagcgcggccagcgtgacccagtagcggtccacttcaaagaagtggcgcagcttctcgcgcgtgtccgagcggccgaagccgtcggtgcccagcaccacgtagcggcgcggcacgaacggacggatctgctcggcaaacgcacgcacgtagtcggtggaggcgatcaccgggccgcgggccgacttcaggctcttggccacgtgcgattcgcgcggggtctcggtcgggtgcagcaggttgaagcgctcgacgtcgtggccttcgcgggccagttcggtgaagctcgggcagccccacaggtccgactccacgccccagtccttcttgagcaggtcggcagcggcgatcacctcgcggaagatcgtgcccgagcccagcagctgcacgcgcggcgcgttgctgttctcgacacccttgcggaactggtacatgcccttgacgatgtcctgctccacgccagccggcatttccggatgctcgtagttctcgttcatcaccgtcaggtagtagtagacgtcttcctgctcggcgtacatgcggcgcaggccgtcctgcatgaccaccgccagttcgtactggaaggtcgggtcgtacgagatgcagttcgggatcgcggcgtggaacacgtgcgagtggccgtcttcatgctgcaggccttcgccgttcagcgtggtgcggccggcggtgccgcccagcaggaagccgcgcgagcgcatgtcggcagcggcccagcacaggtcgccgatacgctggatgccgaacatcgagtagtagatgtagaacgggatcatctgcacgccgtgcgtcgagtacgacgtggcggccgcgatccagtcgcacatggcgcctgcttcgttgatgccctcctgcagcacctggccagtctgcgattccttgtagaacatcagctggtcatggtcttccggcacgtacttctggccttcctggttccagatgccgacctggcggaacaggccttccatgccgaaggtgcgcgactcgtccggcacgatgggcaccacgtgcttgccgatctgcttgtctttcagcagcgtgttcaggatccgcacgaaggccatggtggtggacacttcgcggccttcgccggtggccttcagcagcgcgtcgaacgcggacagctgcgggaccggcagcgcttcggccttctggcggcgggccggcaggtagccgcccaggttctgccgcgcctggcgcatgtattccagttccttcgaaccttccgggaaggtgatgtacggcacctcttcgagctggtcgtcggcaacgggaagattgaactggtcgcggaacttgcggatcgcgtccaccggcatcttcttctgctggtgggccacgttcatggcctggccggcgtcgcccatgccatagcccttgatggtcttggccaggatcagcgtgggctggcccttgtgctcgctggcggccttgtaggcggcgtagatcttgtgcggatcgtggccgccgcggttcaggcgccagatgtcgtcgtcggaccagtcggccaccatcgccttcagctcaggcgtgttgaagaagtgctcgcggacataggcgccgtccttggccttcatggtctggtactcgccgtcgacgcattccatcatgcgcttcatcagcaggcccttggtgtcgcgcgccagcagcgaatcccacttgctgccccacaccaccttgatcacgttccagccggcaccgcggaattcggattccagttcctggatgatcttgccgttgccgcgcaccgggccatccaggcgctggaggttgcagttgatgacgaagaccaggttgtcgagcttctcgcggccggccatgccgatcgcacccagcgattccggctcgtcggtctcgccgtcgcccaggaaggcccagaccttgcggtcgccggccttggccaggccgcggctgtccaggtacttcatgaagcgggcctggtagatggccatgatcgggcccaggcccatcgacaccgtcgggaactgccagaagtccggcatcagccacgggtgcgggtaggacgagatgcccttgccgtccacctcctggcggaagttgtcgagctggtcctgggtcaggcggccgagcaggaaggcgcgcgaatacacgcccggagccgagtggccctgcacgaacaccaggtcgccgccgccggcttccgacggggcgcgccagaagtggttgtagccgacgtcatacagcgtggccgccgaggcgaacgacgagatgtggccgccgacgttggtgtgcttgttggcgcgcagcaccatcgccatggcgttccagcgggtgtacgagcggatccggtgctcgatgtcctggtcgccggggatgcgggcctgctgctcgaccggaatcgtgttgatgtactgcgtctcggcgtggaacggctgggtcacgccgttcacgcgtgcgtattcgatctgcttgtcgatcaggaaagcggcgcgcgccggaccttcggcggccaggacgccctgcagggcgtcgagccattcatgggtttcctggggatcggcgtcgttggcgctcgaggcgccgagaatctgctctggtacggcggacatgactgtctcctgggtgaattctttgcatccgcgcccgcgctggcagcgcccggacacgactttacgtatgactcgcaccgacttgcggatccggcaccatgccgccttgcatcggggccgccgccgggaaacctgttccggtttctccgcgcggcaggcgcatggctgccgcccgcattcttgggtcgaaccgattctatggaagcccaaagtccagcacaagtgaaattttcaaattgcggtatcgttttttataatgtggaattatgcggcggcgcaccaagaatcactgcccggctgccccgccatgcgccataagcctacccgccccggccgcagcagcaatgttttcattggcgctttccccaagcgacgcaccgcaataatctcggtacactggtcggtcagccgtcaatccctcccatgccgtttttcgaccgactcctttccagcctgcgtgcagccatgcttcctcccgacgcgtcggggtcagccaaggcggccggaggcgatcccgcgcacgccccttcgccggctgccggactggggccgatcgaggcgctgggccccgacgacggcgcccccgtggccgcaccgcgcgggctgtggtggctgcgctggcgcaacctggtggccaccagctggttcatgttcatcccgctggttgccatcgtgctgttcacggtggccatgggcgtgatcctgtggcccctgcacgagaccgagcgccagcagcagcgcgacgccctgtaccgcgacgccgcctgggcgcagcagcgcgtgcgcctgtccctgctgagcaaccaggaccagctggcctcgctggcgcgcgacatcgccgccgcgcagcttgagcaaggcgcctaccgcaccgcggcgcaggaaatcctgcgcgaaaaccccgagatcgttttcatcaactggctcgatgccaccaagcgcggccgctggtcgttgccatcgacctcggaattcgccagccgcctgcgcgagaaccaggaccagccgctcgaaccggaagtgctcgacaccttcgacgccgcgcgcgagacccagcgagtggtctattcgcgcccgctggtcaacgagcgcggcgacagcttcatgctgatggaagtgccgatcgtgcgcgacaacgagttcctcggcacgctcggcgcgctgtactcgatcaacggcatcctgacgcacctgctgccgcctgagctgaccgagcgctaccgcttctcgctgatcgacaagaacaaccagacccgcgccagcacctcgttgcggccggtgccgggcaacgcgctgtcgtacgaggtgctgctggatccgccgggtcactccctgtcgctgcgcgccgatgcctacccgccggcgtcgaacctgcccaacaacatgctgctgtggctggtggtggggctgtcgtgcttcctgctgtggagcctgtggagcatgtggcgccacaccagccgccgctccgaggcgcagcgcgcgctgctggccgagacctcgttccggcgcgcgatggaaaactcgatgctgatcggcctgcgcgcgctcgacctgaacggccgcatcacctatgtcaacccggccttctgccgcatgactggctggcaggagaacgacctggtcgggcgcctgccgcccttcccctactggccgcccaacgaccagcaggagatgcagaagcagatcgacctgacgctgcagggcaagtcgcccgccggcggctacgagatgcgcgtgatgcgccgcgacggcagcagcttctacgcgcgcatgtacgtgtcgccgctggtggacagccgcggccgccatactggctggatgagctcgatgacggacatcaccgagcccaagcgcgcgcgcgaggaactggccgcggcgcatgaccgcttcaccacggtgctggaaagcctggatgccgcggtgtcggtgctggccaccgacaaggcggagctgctctttgccaaccgctattaccgccagctgttcggctgggaggccgagggccacctcaagctggccggcgacgacctcgacaaggaccaggtctccagcgacaacaccgactatgtcgacgcctatgccggcctgccggcgtccgagctgatgccgtacgcatcggacgcgcgcgaagtgttcgtgccggacatgcagaaatggttcgaagtgcgccgccgctatatccagtgggtcgacggccacctggcgcagatgcagatcgccaccgatatcacggtgcgcaaggccgccgaggaaatggcgcgccagcatgaagagcgcctgcagttcaccagccgcctgaccaccatgggcgagatggcctcgtcgctggcgcatgaactgaaccagccgctggcggccatcaacaactactgcatgggcgcggtggcgcggctgcactcgggccgcagcacgccggaggacctgatcccggtgctggagaagacctcggcccaggcggtgcgcgccggcaccatcatcagccgcatccgcggcttcgtgaagcgcagccagccgcagcggcgcgaggccgcgctgcacgacatcgtcgccgacgcggtaggcctggccgacctggaggccacgcgccgccgcgtcaccatcctgacccgcctgccgaccccgccgctgacggtctatgtcgacccggtgctgatcgagcaggtgctggtgaacctgctcaagaacgcggtcgaggccatggccggcctgcccgccctgcacgccggcggcgtggtgcgcctgcacgcgcgggtggagccgggcgagattggcgacagcgtccatatcgacgtgatcgaccagggcccgggcgtggacgaagccaccaaggagcgcctgttcgagcccttcttcagcaccaagtccgacggcatgggcatggggctgaacatctgccgctcgatcatcgagtcgcaccagggccgcctgtgggtggagaacaatgccgacggcatcggctgtacatttaaaatcatgctgccgctgcaatcggcgctggccgagcattaagccgaagcacaggccctgttgccgaggccttcgcgcccgggcatgcccaaggattccacaaaaagccggcccgccccgtttcccccacggatgtggggggcctgtctcgccacagagggccgctgccggttacacttcgcagcaatgaattgttgtcccgaggagactacatgaccgcaacgccaaaccccacgccccaccgcggcgagaccgtgttcatcgtcgacgacgatgaagccatgcgcgactcgctgacctggctgctggagggcaatggctaccaggtgcgcagcttcaccagcgccgagcagttcctcgccgcctacgatgccagccaggtgtcgtgcctgatcctcgacgtgcgcatgcccggcatgagcggcccggaactgcaggagcgcatgctggccgagcagatcgacattcccatcgtctttatcaccggccacggcgacgtgccgatggcggtatcgacgatgaagcgcggcgccatcgacttcatcgaaaagcccttcgatgagtccgagctgcgcgcactggtcgagcgcatgctgaccaaggcccgcaccgaccattccgccgcacgcgagcagcgcgccgccaaggacctgctgggcaagctgaccacgcgcgagcagcaggtgctcgagcgcatcgttgccggccgcctgaacaagcagatcgccgacgacctgggcatttccatcaagaccgtggaggcgcaccgcgccaacatcatggaaaagctcaacgtcaacaccgtcgccgacctgctgcgcctggcgctgtcacgcaacagctgagcggctggcgcctgcctctgcctgacccggtgcggcccgcggccgcaccggctgccctctccgcgccgtccggcgccgcccctgccccctcagtcccgtcagcggtccaggtattcctcgtcccggaacgtgaccacccattgtggccgatagaccacaaaaatcgccaccagcatgccggtcaggaaggcctcgccaaaggccaggatgacggctgccgtcagggtatcggcaatgctccatggcaggcccggcgccgtcaggtggcgccagccggcctcggccgcgctggcgcccagcgcggccagcccggccgtgaaatagccgtgcccgaggataaagacgaacggatgccgcggcagcagacgccgcatcatcgcctgcaacgctgcggagatcagcgccggcagcagcgccagccagacgtagcgcacccacagcgagggccagtcgaactgtgcccagccatgcccggccaggtattcgagcccgaacagcgacaccacgtccaccacgaacagcgacagcagcgccagcggcagcccgaacagcgtcaccatcagcgtggcgccgagcaactggatcaccagcccgccgaccagggtggcgcgcaacgtccacagcagcgccaccagcaccatcgcacccagccaggcgttctgcagcgcattgcgccgcaacagctgccagggccggcgcgtcagcgcccacagcagtgccgccagggacagcaacaacagcaagggatgggacagcagggatggaagcgcggtgtgcattcggccgatgctaccagcgctgcccccgcccggccttgcacccgctcaagctccgtgcggcaagccccacgcaacctttataattccgcctttagcccaacccgcgctccggcgcgcggcggcacctccacctcccggccacaaacccgccctgcctccatgcctgcccaactgatcgacggcaatgcccttgccaaacaaatccgctccgaagccgccctgcgcgccgcccgcctgaccgagcgtggccaccggcccggcctggccgtgatcctggtcggcgaggacccggccagccaggtctacgtccgcaacaaggtcaaggcctgccaggacaacggctttcattcctcgctcgaccgctacccggccgacctgtcggaggcggaactgctggcccgtatcgaggccctgaaccaggaccccaacatccacggcatcctggtgcagctgcccctgcccaagcatatcgacagccacaaggtgcttgaagccatcgcccccgaaaaggatgtcgacggcttccatgtggccaatgccggcgcgctgatgaccggcgccccgctgttccgcccgtgcacgccctacggctgcatgaagatgctggaatcggtccagttcccgctgcgcggcgcccgcgccgtggtggtgggcgcctccaatatcgtcggcaagccgatggcgatgctgctgctgcaggccggcgccaccgtcaccatctgcaacagcaagacgcgcgacatcggcgcccacacccgcgacgcggatgtggtggtggccgcggtcggcaaacgcaacctgatcaccgccgacatggtcaaaccgggcgcggtggtgatcgacgtgggcatgaaccgcgacgacaacggcaagctgtgcggcgacgtcgactttgccggcgtgcgtgaagtcgccggctacatcacgccggtgccgggcggcgtcggcccgatgaccatcaccatgctgctggtcaatacgctggaagccgccgagcgcgccgccggctgaggccgcgcgtacgatacgccacccggggccctggaaaatccggcgccccggccccatctgcgggattattgcccgatcgaggccagccaaccgagaacacgccatggaccaagccgccaacgctaccaatcctctgctggacttttccgacctgccccgctttgccgagatccggcccgagcacatcagcccggcgctggacgtgctgctggaacgcgcgcagcaggccgtcgcccgcgccgaagatccggccacgcccgccgactggagcaacgccgtgcaggcgctggaagcggccaccgagccgctgggccgcgcctggggcgtggtcagccacctgagcgccgtggccgatacgcccgaactgcgcaaggctcacgccgagaacctgccgcgcatgaccgagttctggtcctcgctcggccagagcctggcgctgtatgagaagtacaaggcgctggctgccagcccggagttcgccggcatgagcgcggcgcgccaccagctgatcgagaacgaactgcgcggcttccgcctgggcggtgccgaactgcctgaaggcaagaagccgcgcttcgccgagatccaggagcagcaggcccagctgtccaaggccttttccgaccacgtgctggatgccaccaacgcctacgcgctgcatgtcgaggacgagggccgcctgtccggcctgcccgatgacgccagggaagccgcccgccatgccgcagagaaggatggcaaggccggctggaaattcacgctgcacttcccgtcctacttcccggtgctgcagtacgcggacgaccgcgcgctgcgccagaccctgtatgtagccaatgtaacgcgcgcctcggaactgggcccgcagcatggtcagggccaggccgactgggacaataccgccaatatgcgcgagcagctggccctgcgccgcgaagaggcgcagatgctgggctaccagtgctacggcgaagtctcgctggtgccgaagatggccgaatcgccggccgaggtgctgaagttcctcgacgagctcgccgtcaaggcgcgcccctacgccgagaaggactgggccgaaatgaaggcctttgccgccgcagagctggggctgcctgagctggcgccatgggatgtcgcctatgcctcggagaagctgcgccagcagcgctatgcgttctccgagcaagaggtcaagcagtacttcccggaagcgaaggtgctcgagggcctgttcggcgtggtgcagaagctgttctcggtgcgcatcgagcccgagcaggcgcagacctggcacaaggacgcgcgcttcttccgcgtcaccaccgccgacggcacgctgctggcccagttctacatcgacctgtacgcgcgcgaaggcaagcgcggcggcgcctggatggacgacgcgcgcggccgcaaggtgctggagcaaggcggcgtgcagacgccggtggcctacctgacctgcaacttctccgcgccggtgggcgacaagcccgcgctgttcacgcacgatgaagtgatcaccctgttccatgagttcggccacggcctgcaccacatgctgacgcaggtgggcgagctcggcgtgtcgggcatcaacggcgtggaatgggatgcggtggagctgccgtcgcagttcatggagaacttctgctgggagtacgaggtgctgaccggcatgacgcagcacatcgacaccggcgagccgctgccacgcgcgctgttcgaccgcatgctggccgccaagaacttccagaacggcatgatgacgctgcgccagatcgtgttttcgtcgttcgacatgcacctgcacaccgacttcgatccggccggcgccacctcggtgctggacctgtcgcgccagatcaacgaccgcgtgcacgtggtgccacagcatccgctgtcgcgctggccgaacaccttcagccatatcttcgccggcggctatgcggcgggctactacagctacaagtgggccgaggtgctgtcggccgacgtgtacgcggcgttcgaggaagccgctcagctgtcgggcagcgtgctcgacagcgagaccggcgcgcgctaccagcgcgagatcctgtcggtgggcggcagccgtccggcaatggactcgtttgtcgcgttccgcggccgcgcgccgcagatcgacgcgctgctgcgccacggcgggatggcagcatgagcgcggccgccctgcccgccagcggcccgcttcgcattgccagctggaacgtcaactcgctcaaggtgcgcctgccgcaggtgctgcaatggctggccgagcaggaccagaccggcgcgccgatcgacgcgctgtgcctgcaggaactgaagctgccggacgacaagtacccgctggccgaactggagaacgcgggcttccacagcatctacaccgggcagaagacgtacaacggcgtggccatcctcgcacgcgacgccagcatgcccggccccgccgacgtggtgcgcaacatccccggcttcgaggacgcgcagcagcgcgtgatcgctgccacttatggcgacctgcggctggtctgcgcctacttccccaacgggcaggcgccggactcggacaagttcgtctacaagctcaagtggctggacgcgatgacggcgtggctgcgcgaagaaatgaagcgctacccgaagctggcgctgctgggcgacttcaatatcgcgccggaagaccgcgacgtgcacgaccccaagaaatgggaaggccagaacctggtctcgccgcaggagcgcgccgcctttgccgcactggtggagctcggcctggcggatgcgttccgccagttcgagcagccggagaaggccttctcgtggtgggactaccgcatgatggcgttccgccgcaatgcgggcctgcgcatcgaccacatcctgctgtcgccggcattgaccagcggctgcagcgcctgcgtgatcgaccgcgtgccgcgcacgtgggagcagccgtcggaccacacgccggtggtcgccacgctcagttgcaactgaacgcgccgctggcgccgcgcgcgggttcaggcaagtccgcacaagccccgctcgccgcgcggcgccgcgcccgctacactgcgggcatgagccacacccgccaggccatgttccgccaccgcaaccttcctcacctgctgctgcaagcgcgcgagacattgctggccggctttcgcccgatcctgcggcagttcggcatcaccgagcagcaatggcgcgtgatgcgcacgctcaacgagcgcgagccgatggagccgaaccagctggccgacgcctgcctgatcctgagccccagcctgacccgcatgctgtgcggcatggaagacgccgggctggtcgaacggacccgctctgccaccgaccagcgccgccagctggtcagcctgacgccgtcggcgcgcgccatcatcgtgcaaatggagccgctggtcgatgcgcgctaccaggagctggcgcagcggctcggcccggagcgcctgaccgaggtctaccgcgcgctcgacgccatgctggccggcctggcgccgcagccgaacctgcccgaatccaccccgcccgaatccgttgcctcgccaccgcctgggcgcggcggcgaggccggctgagcctgccccttcattgccgatgcccgcgtcccatcccggatcactcctgccgcgcctgttcccatggagccagcgcgtcgacaagaccacgctgcgcgccgacctggtggccggcctgctcggcgccgtgctggtgctgccgcagggcgtggccttcgccacgctggcgggcctgccgccgcaatatggcatctacagcgcggtggtgccgtgcatcgtggcggcgctgttcggttcgagctggcacgtgatgtcggggccgaccaacgccaattcgctggcattgttcgcgatgctgagcccgcttgcgtttgccggcagcccagcctatatcgcgctggcgctggcggtcaccatcgtggtgggcgtgatgcagctcgccgtgggcacgttgcggctgggcacgctggccaactttatttcgccgtcggtgctgctcggtttcacctgcggcgccgcgacgctgatcggcctgtatgcgctcaaggacctgttcgggctggcggtgccgaccggcaccagtgcattcggcgtgctgcgccacctgttcgagaacatcgacgccatcaactggggcgcggccgccgtaggcgcggtcacgctggtggtgacgctgctgtgcaagcggctgtggccgcggctgccgttcatgctgctggggctgctggccggctacggcgtggcgctgctgctgaaccagtccggcgcgggcggcgcccaccatgtcaacgtggtcgggccgatcccgtcggcgctgccgcgcttccaccttcccgatgtggactggcgcaagctgccagacctgctgggcatcgcctcggcgctgaccatcgtcgcgctgggccagtcgatctcgatcgccaaggcggtggcgctgcgctcgggccagcatatcgacgccaaccgcgagttcatcggccagggcctgtccaatatcgcgggcggcttcttctcgggctatatctcgtgcggctcgctcaaccgctcggtacccaatttcgaagccggcgcgcgcacgccgctggccagcgtgttctcggcgctgtggctggtggcgctggtggctgtcagcgccccgctgctggcacagatcccgatggcggcgatcgccgcgatgttgctgctggtggcgtggggcctgctcgacaccgcgcggctgcgccgcatcttcacgctcagccgcacggaatttgccatcgccatcggcaccttcgccgccacgctggtgatccggctggagatggcggtgctgctcggcaccgtgctgtcgctggtggcgtacctgtaccgcacctcgcggccggccgtgcgcagcctggtgcccgatgccgacgatcccggccggcgcttcacgccgctggacgagctgcgccgcccgcagccggaatgcccgcaactgaagctgctgcgcatggaaggcgcgatctacttcggcgcggtgcagtacgtgacggatcgcctgcactggctgcgcacggtcaacgccggccagacgcacctgctggcgatgaccaagagcatgaacttcatcgacctggccggtgccgagatgtgggaaaacgagctcgccgaacggcgcgcgctgggcggcgatctgtacttccaccgcccgcgcacgcaggtcttgcagacctgggcgcagaccggctttaccgacaagctcggagccgaccatatcttcccgacgaagcggcaggcgctgcacacgatcgtcggccagctctcgccggaaatctgcgcgcaatgcaccgtgcggatctttgaagaatgcgcatcacgaccaggcgccgcgaccccggcagcacaatgaactgaagcgccggcgcgtcggcatgagcggcggccgcgcgccagcgttcagcaacagtacggctgcaggaaaaacctggaaactgaaacgggaaaagcggggatctgcctgtgccggcgttgccggcttggcacgcaaggccggacggccctacgtctgggaacctgataacagataggcgcccgcggcatgccggggcctggccggggcatccatccgcatcagatcggcgccacgtgggcgcgcttgacgacgattggctggggcgcgccctgctcgatcagcaccacggcggcgcgttcgatggtttcgcggccggcacggaatgcctcttccagcgacagtacctggtcggcactgaagccttcccacagtgcttcgcgtgtcaccacgcaagtcaccttctcgccattgacaagtgcctggaacaacaagccttcattattgatgtcgtagcgctcttgctcttggaatttgatttccatcggtgcagccctccatatgcaagtggagaaacatcctaacatggctccggcaaaatcgtatggatagagcccatgcgaatgcgctcattgcgaagaccatcacggccgccttcgagttccatccgcgcgtatgtgtggctcccggtcacaatgacggggttgttccggcaagtgcgtcaaacatttgacagcgccgaaaatcatgctagaatctcgttcttcgttggggcgttagctcagttggtagagcagcggactcttaatccgtaggtcgagtgttcgagtcactcacgccccaccaccgaatacagaaaggccggaagcagcaatgcttccggccttttgctttgtgcgcttgcctgattggctaatccgccgcggcgcaggcacgtgcccacgccacagcggccccgtgcatcaggcgccctggctggcgcgctcgaacagcgtacgtgccagcgcgcgatggcacagcagcacgttgggcaggtcgaccgtcagcagtgcaccgtcgcgcaccacttccctgccgttgatcacgctcgccgcgacattggccggcgtgcagaacaccagcgccgccaccgggtcatggccggcgccggcaaagccgacctgcgacatgtcgaaggcgacaaaatccgccgacatgcccggcgccagcgcaccgatatcgtcgcggttgagcacgcgcgcgccacccagcgtggcaatctccagcgcctcgcgcgcgctcatggcggccggcccgtagccaacgcgctgcagcagcatggcctggcgcgcctcgcccagcatatgcgcgccgtcgttcgacgcgctgccgtccacgcccaggcccaccggcacgccggcatcgcgcatggcgcgcaccggtgcaatgccggatgccagccgcatgttcgagcacgggcaatgcgccacgccggtcccggtgcgggcaaacagtgcgatgccctcgtcgtccagcttgacgcagtgcgcatgccacacatcgtgtccgacccagcccaggtcctcggcatactgggccggcgtcaggccgaatttctcacgcgagtaggcaatgtcgttgtcgttctcggccaggtgcgtgtgcagcgacacgccatagtgccgcgccatattggccgactcgcgcatcaggtcgcgtgacaccgaaaacggcgagcacggcgccagcaccacgcgcagcatcgcgtggcgcgcactgtcgtggtactgctccaccagccgctggctgtcgcgcaggatggcggcctcctcttccaccaccacgtccggcggcaggccgcccttgctgcggcccacgctcatcgagccgcgcgcggcgtggaagcgcatgcccatctcctgcgccgcggcaatcgagtcatccaggcgcgacccgttcgggaacaagtagaggtggtcgctggtggtggtgcagcccgacagcatcagctcggccatcgcggtcttggtcgacaccgcgatcatttccggcgtcaggtgcgaccacagcatgtacaggttggtcagccacgagaacagctcggcgtcctgcgcggctggcaccgcgcgcgtcaggctctggtacatgtggtggtgggtgttgaccagaccgggcgtgaccacgcgaccgcgcatgtcgagcacctgcgcgctgccgtcgtcgaccatgcgccggtactgcggcggcagttccgaggtcgggccgacccactgcacggcggggccttcggcaaccagggcgccatcgcggatctcgcggcgctgcgcatccatggtgaccagcacgtcggcgttcagggcaatcagggtcatggcggaattccttctgcaaaacgaattgggggactggatggcagccagtctacggcggcgaagtgcaatcccccaagcgcagaattccgatcatcctgtccacaaaaagtggacacctgcgacaccctgttgctcagcgcgcctgcgcgaacaagaccgccagcgcgtcgccgatgcgctcggccatcagctcggcagcggcgctgagcgggccgcgagcgcgcgccaccagcgtcagcgtctggccctgcaggtggcggtcgcgcagtggcacgtagaccagcgcctggcgggcgcgctcttccatcacatcgagcgggttcagcagcgcgatgccggtgcccagcatcaccagttgccggatcagcgcggtcgaggtggactccgccaccggcgagacctcgatcgcattgcgggcaaaggccgcatccaggatggcgcggatcgacagcgagggcgccggcaggatcagcggatagccgacgcattcgctcagcagcgccgattgccgggccgccagcgcatggcccggcggcaccaccgcgccgatctgccagtcgctggtggccagcgcgcggaaggcgggcagctcaggcaggtcatagccaaggcccaggtcggcgtcgccctgccccaccgccgtggtgatatcggccaccggcaggtcggcgacgcgcaccacgatgcccgggtagcgctggcggaagtcatgcaccagcgacggcatcagcgagcccgccaggccggccgtgaccgccacggtgacctcgccgcggcgcgcgcccttgaagtcctcgatgcgctcgcgcagcgcgtcgtgctcgcgcagcgtctggcgcacgtgggccagcaccatctcgcccagcggcgtcagccgcagccgcttgttgatgcgctcgaacagcggcgcgcccagttccgcctccaggtccaggatctggcggttgaccgcggtcggcgccacatgcaggtgctcggccgccttgcggatcgaaccgcggcggacgacctcgtcgagatagcgcaggactctggcgtgcatggactgggcaagcagttggatagtaaccaccgcgcgggacgcgcgcggtggctggcattgtagcggccagtgcagcctggctcgcaaaaattgcgcgaaggctattgcgtcttatcagataccttgctaaaatctttttcttcgttggggcgttagctcagttggtagagcagcggactcttaatccgtaggtcgagtgttcgagtcactcacgccccaccagcgaattcaggaaaagccggaagccttgcttccggcttttttcatttccgccgcgctgctttgcgcgcgcggtcggcatggctgccggtttcttgatacgcgggttctcaccaattcccctgcgcccgctttcccggttgaatcgcatccgcgcacattgtggaacatggttccgtatcgcggaactatcgcaaggtgccggccgtcgccgcatcccggcacggcccggtcatgccagcgcggggaaccgtgacagcgcggggcgcagacgaaaggtctgggtccgaagaaacgcctgcagcccgcctggcgaatcagtgaaagaagaacggaggcactccttgaaagcagttatcagcgccggcgcagccgcctgcatcgcggcccttggcctggcccacggcctggcccaagcccagtcctaccccaacaagccgatccgcctgatcgttccgttcgcggccggcggcaccaccgacatcgttgcgcgcgcggtctccgacggccttggccgcgagctgggccagccggtggtggtggaaaaccgcggcggcggcggcggcgcgatcggcgccgacgcgctcgccaagtccgccccggacggctacacgctgggcatcgccaccgtcagcacgatggcgaccaaccccgccaccaaccccaagaacccgtacgacccgctcaaggacttcgcgccgatcaccaacctggtcaacgtgccgaacgtgctgacggtcaacccgaaggtgccggccaagacccttaaggagttcgtcgcgatgctgcaggccagccccggcaagtacagctacgcctcggccggcaagggcagcatctcgcacctggacggcgagctgttcaaggacatcaccaagaccgacatggtccatatcccctaccgcggatcgggccctgcgctgaacgacacgctggccggccaggtcaacgcgcagttcgacaacctgccgtcgtcgatgccgcatatccaggtcggcaagctgcgcgcgctggcagtggcggcgcccaagcgggtcgagggcctgccagacgtgccgacctttgccgaagccggcatgaaggacatgaacaacatggcctggtacggcctggtggccccggccggcacgccggcggcaatcatcacgcgcgtgcatgatgccgcggtcaaggcgctgcaggaccccaacgtcaagcgccgcctggccgacagcggtgcctacaccgacggcaacaccccggcgcagtacgccgcccagatcaagcgcgagctggacctgcgcaagaagatcgcacgcgaccagaacatcacactggaataaccggacggcgaaaccgtcccgcgaggggtcatgaccggctgccacctggcagccggtttttttatggctgccagttgaaaatgtgccatcagtcacccacatctgccccagaatcgttgcatttgatccggcgcagtacgcaggcaacgccatcggtattcaatacttgtagaagaaactttcactttgcggacaagcgctgactcggtacattaaccgggtgttccgccacatgtgcccagccgccaccggccaggctcggccccaaaaccggattcgcgcaggcgctgcgcgaccgtcaatcgcgaggataagcaagatgctgaagaagaccgtttcgaccctgatcgttgcagcactggccgcgctgggcgcgacgcaggtctatgcgcagaagaactacaccgaaggcggcgatctctacggtggcagccacaccaagaaggccagcccgaaccagaaccccgccaaatccggcaagttcgacccgtacaccgatggcgccaagcaatcgaccaagtcggacctgaccaactcgggcaagaagttcgacccgaacacggatggcgccaaggccggcaagttcgatccgtacaccgacggcgccaaggccggcaaggctgatccgtacaccgacggcgccaaggcgcctgccagccagggcggcaaggcgcagtaagcctgccccggcggcaccaaggcaaacagcccgcttgcgcgggctgttttgctttctggcggaagccgcgctcaggctgccatcgcctgggccggctgcgcgggcagcatggtgccgcggtcgcggaagccgacatgccaggacagcgcctcttccagcaggtgcggggtctggccgccatgggtgctggcgcgccggaagtagtcgcccagcagctcgcggtattgcgggtcggcacagttgtcgatgaccgtgcgcgcgcgttcgcgcggcgccaggccgcgcaggtcggccaggccgtgctcggtgacgatgatgtcgacgtcgtgctcggtatggtccacgtgcgccaccatcggcacgatgctggaggcatcgccgtccttggccaccgacttggtcacgaataccgacaggtgcgcattgcgcgcaaaatcgccggagccaccgatgccgttcatcatgtgcgtgccccccacatgcgtggagttgacgttgccgtaaatgtcgcactcgagcgccgtgttgatggtaatcagcccgagccggcgcaggatctcaggatggttgctgatctcctgcggacgcagcagcaggcgcgagcgatagcggtccaggttggacaggaagcgctggtacacctcgcgcgtcagcgtcaccgaagaggccgaggcaaacgccaggcgccccgcatccagaagttcgatggtgctgtcctgcagcacctcggaatacatctgcaagtcgcggaacggtgaatcgaccatgccgtgcaacaccgcgttggcaatggtgccaatgcccgcctgcagcggctgcagcgagggcgagagcctgccggcgcggacttcgcgcagcaggaaatcgttgagatggccggcgatattgcgggtatcggcatccggcggcagcgcgttggacgggctatcgtccttggcggtgatgacgatggccgcgatcttctcgggatcgatggggatatacggcaggcgaatgcgctgctcgggcgcaatcagcgggatcggctggcggtacgggcgccgcaccgggaagtagatgtcgtgcagcccttccagctccagcggcatgttcaggttgatctcgacgatcaccttgcgcgccagtatggcgaagctggccgagttgccgaccgaggtgctggggatgatgccgccctgctcggtgatcgccaccgcttccaccacggcaacgtccaccggtgcgatctggccggaacgcagttgctccacggtctcggacaggtgctggtcgatgaacatcacttcgcctgcgttgatcttgcggcgcagcgtcgcgtcggactggaacggcaggcggcgcgcaatcacgtccgcctcggcgagtacccgatcgatgtcgtttcccagcgacgcgccggtcatcagggtgatgcgcagaggctcggtggccgcgcgccgcgccagcgcaaacgggacttccttgcagtcgcccgcgcgcgtgaaaccgctcatgcctaccgtcatgccatcgcggatcagcgcggcggcttcgtcggccgagactaccttgtcgtgcagcctggccaggcgaatgcgttccttgtacatccttatctccggtctggcggccgggcccgtgcccgcgccgcgcgcccctgctggcctgaaggctcgttggcggggtctccggcaggcagtgtagccagccgcatacattctggctgtgatttaaagtcatggctcccagtcgctttattcatagctcaagccatgccaggggtcgtgcgggatactatgtccctgtggtgccacagggcattcccgacctgtcacaattccggcaaaagattctggtagtgtctggcccatcggtcgaccgtgccccgccagagaggctgcggcgcccgtgccgcccgggccggccatgctccggcccctggtacccgcgcgacggatgccagcgcatcgcagtggcggcaaaccaaaacaggagacgccattcatgcagccaagacccctcgaacccagcgagccggttgtccttgccctggttgatgccgtaaccgcctggcaaggtgcgttggaacagacgctatgcgcctctggcctgaactactcccagtggctgctgctgcgggccatccgccaggatgccttcgtgcgcggctcgccattgacgggcccgatgccgatcgatgtcgagcgttccgagacgatgctggatgaactgcggcgcgacggctggatcgagtacgccggcactcaggcgccccgcattgcagaaagcgcagccaaccggctgcagcgcaccgcccaggccctcagcgcgctgcacagcgtgtcagtggcggcgttcagttcgcaagagcgcgctgcgctgggcaccctgctggagcggatgaagaccacgctgagcgaccacaccactcgccaggttcgcgcgggcaccgaagccgcccggcaggaaaaagctgtcgcgccctcgcattgccccggcctgccgccggtcgcacaccgccccacctcttgccccaccctcgccgccacgcgcctctgagcgccgcgcaagccgtcccgcgggcagcagcgggaggccgcccaccttttcttcgcgcgccatcgtcatacccgccacttttcttgcgccgggcatgcggatttttcctaaagtatgagcatgccccggcacatgccgcgggccgcccgtcgacaccgcgaggagggatcatgccgcaggagaacgaagacaaggtcgcgcacctgctggacgaactggccagcttcgcgcgcgagcggctgccggcggcgatgttcgccgtggtcgagcccttcctgctgcactactacgatcaggccgacgccgaggacttgctccagcgcgacgtcgacgatctctacggcgccgtgatggcgcactggcagaccgcacagaaattcacccccggcaatgcgcgcatccgcgtctacaatcccaacctggaagagcacggctggcactcggaccacaccgtggtcgagatcgtcaatgacgacatgcccttcctggtcgactcggtgacgatggagatcaaccggcagggactggcgctgcactcggccatccatcccgtgttccgggtctggcgcgacgcgcgcggcggcatcgagcggatcgccccgggcggcgccggcgaggccggggacagctcgcgcctggaatcctttatccatttcgagatcgaccgcagcggcgaggccgcgcggctggaggcgctgcgcagcggcattgcgcaggtgctggtcgacgtgcgcgcggcggtggaagactggtcgaagatgtgcggcatcacccaggccaccatcgccgccatggcgcaggcgcccgacgcggccgcgccggagagcgtcgaggcgcgcgccttcctggactggatgatggatgaccacttctccttcctcggccagcgtgactaccagctggtgtcgcaggacggccgctacttcctgcgcggcgtgccgggctcgggcgcgggcatcctgcgcgaaagcctgcgcgagcctgatgccgaagatctcacgctgctgcccgccgcggccaccgcgatcatcgaaggggcctcgccgatcttcctgaccaaggccaattcgcgcgccaccgtgcaccgcccgggctatctcgactatgtcggcgtcaagctgctcgatgaaaaggggcagctgttcggcgagcggcgctttgtcggcctgtacacctcgactgcctatacggcgccgattgcggaaattccgctggtgcggctcaagtgcgccaatatcctggcgcgcgcgggcttcctggccaaggggcacctttacaagtcgctggtgaccatccttgagcaatatccgcgcgatgaactgttccaggccaccgaggatgaactgttcgacatcaccaccggcatcctgcggctgcaggaacaccagcgcacccggctctttgtacggcgcgaccgcttcgaccgctttgtctcgtgcctggtgttcgtgccgcgcgacaagtacaacaccgacctgcgccagaagatccagaggctgctgaccgcggccttccacggcaccagctgcgagttcacgccgctgctgtccgagtcgccgctggcgcgcatccagctgaccgtgcgcggcgagcccggcaccatgccgcatgttgatacgcgtgagctggaggcgcgcatcgtgcacgccagccgccgctggcaggacgatctcgccgaagccctgcatgaaagccacggcgaagagcaaggcaaccggctgctgcagcgctacggcggctcgttccccgccggctaccgtgaggactacccggcccgcaccgcggtgcgcgatatcgagctgatggagcacgcgctgcgcggcaacggcatggcgatgaacctgtaccggccgatcgaggccgcgccgggggtgttccgcttcaaggtgtaccgtgccggcgagccgatcgcgctgtcgcacagcctgcccatgctggaacacctgggcgtgcgcgtggatgaagagcgcccctacctgatcgaacccgacagcggcgcgccggtatgggtgcacgacttcgggctggagattgccgacagcggcggcgcggcggaattcgacatcgcgcgcgtcaaggccttgttcgaggatgcgttcgcgcgcgcctggcacggcgagatcgagaacgacgacttcaaccgcctggtgctgcgcgccgagctggccgcacgcgacgtcaccatcctgcgcgcctatgcccgctacctgcgccaggtaggctcgaccttcagcgacgcctatatcgagcgcgcgctgaccggcaacgcggccattgccgccatgctggtcggcctgttcgtggcgcgcttcgacaccttcagcgaggtcgccaccgacaccgcccgccaggcgcgctgcgacaagctgctggccgatatcggcgcggcgctggacaaggtgcccaacctggacgaggaccgcatcctgcggcttttcctgggcgtgatcaacgccaccgtgcgcaccaactatttccaccgcggcgaggaaggccagccgcgcccatatgtgtcgttcaagttcaatcccgcgctggtccccggcctgcccgagccgcgcccgatgttcgagatctgggtctactcgccgcgcgttgagggcgtgcacctgcgcggcgggcgcgtggcccgcggcggactgcgctggtcagaccggcgcgaggacttccgcactgaagtgctgggcctgatgaaggcgcagatggtcaagaacacggtgatcgtgccggtgggctccaagggcggcttcgtggtcaagcgcccgcccccgcccaccgaccgcgatgcgttcctgcaggagggcatcgcctgctaccagaccttcctgcgcgggctgctggacctcaccgacaacctcgtcggcggccagctggtgccgccacccgaggtggtgcgccacgacgacaacgacccctacctggtggtcgccgccgacaagggcaccgcgacgttctccgacttcgccaacgcgatctcggccgaatacggcttctggctgggcgatgcctttgcgtccgggggctcggtcggctatgaccacaagaagatgggcattaccgcgcgcggtgcgtgggaatcggtcaagcggcatttccgcgagatgggtgtcgatatccagaccacggacttcaccgtggccggcatcggcgacatgtcgggcgatgtgttcggcaacggcatgctgctgtcgccgcatatccggctggtggcggctttcgaccaccggcatatcttcctcgatcccgacccggacacgacaaggagcctgcaggaacgcacgcggctgttcggcctgccccgctcaagctgggccgactacgacgccacgctgatttccgccggcggcggcatctatccgcgcagcgccaagaccatcgcgctgtcgccgcaggtgcaggcggtgctgggggtcacggcagccacgctgtcgccggccgagctgatccacgccatcctgatggcgccggtcgacctgctctacaacggcggcatcggcacttacgtcaagtccagccaggaaacccacctgcaggccggcgaccgcaccaacgacgcggtgcgtgtcaacggcaatgacctgcgctgcaaggtggtcggcgaaggcggcaacctcggcttcacccagctgggccgcatcgagttcgcgcgcaagggcgggcgcatcaacaccgacgccatcgacaactcggccggggtggactgctcggaccacgaggtcaatatcaagatcctgctcgggctggtggttgccgacggcgaaatgaccgagaagcagcgcaacaagctgctggccgagatgaccgacgaggtcggcctgctggtgctgcaggacaactactaccagacccaggcactgtccgtggccgggcgcagcagccccgcgctgctcgacggcgaggcgcgcctggtgcgctggctggagcgcgccggacggctcaaccggccgctggagttcctgccttcggaggaagaaatcgccgagcgcaagctggccgatgaaggcctggcatcgcccgagcgtgccgtgctgcttgcctacagcaagatgtggctgtacgacgaactgctggcctccgacgtgccggaagacacgctggtcgccggactgctgtcggactatttcccggtgccgctgcgccagcgttacgccgacgcgatgcagcgccacccgctgcggcgcgagatcctgtcgacacacctgaccaatatgctggtcaaccgtatcggcgccaccttcgtgcaccggatcatggaagagaccgacgcacgcccggccgatatcgtgcgcgcctgcctgatcgcacgcgatgtcttcggcctgaccaccctgtggcaggagatcgatgcgctggacaaccgtgtggccgatgccgagcaggcgcgcatgttcggggccgtggcgctgctgctggagcgcgcgtgcctgtggttcatccgctatctgcgcagcggcagcaaggccgccgaggacctggcgcgctttgcccaggccgcgcaatggctggccccgcaactgccgcggctgctgccgccggccgatgcgacggcactgtcagagcgcgcccgggccttgacggatgcaggggtcgacgaagcgctggctgtgcgcgtggccggcagcgagatctccgccgccgcgctcgatatcgccgaagtggccacggcgtgcaaacgcagcctggacctggtggcgggggtttatttcgcgctggacagccacctgagcttcagctggctgcgcgagcgcgcgctggcgctgccatcggacacgcactgggacctgctggcacgcaccaccacgctggaagacctggggcggctcaagcgcgcactgaccgtcagcgtgctgtcacaggagggtgaactggatacgcccgacgccatgatcgatgcctggcgctccagccgtcatggcgcgctggaacgctttacgcgcatgctggccgaccagcgcgcctcgggggctgcggggctgtcgatgctgtcggtcgcggtgcgcgagatcggcatgctggaacgcgcatagcgctggccagcccaggcttattcgtctgcttccgcgtccgtgtcgaggtccgcatcgtcgccgatgccggcgcctgcgccacgcgggcgcagttccagcccgagcaggaccagcaggtcgaaggcatcggaaagcaggtgtttctgcctgggcagcaggctggcgtacggcatgtcgtagatcgactggtgcgcggcacgctcgcccttgaggccgcggtcgcgcgcgatatccgacagcagcgcggcaaaccctgagaggtcctgcgctgccagtgctgaattcaataccttggcgatcacttccggcgaagcgttcgcccagcccatgcgttcagcattggaggcagagtcttgaggagggtcggcaaagtccatgattgtgtataacggtcccgcctgagcaagcttaaggcggcaaccatgtgaatttgaccccacatgcgtggggtgacatggcttgccgcccgacgatccgggctagcgcggtaccggcttcgccgccacctggcggtagaccgtgctgccgtcgcgcgcggtgcgtgcctggacgtgattgcgtgcgccgcattgcgggcagcggaacacgggaccctgcccttcattgcggatctgcacctcattcggctcccagcgcgcaccgcaagcctggttcccacaaacaaacatgaaatctccttgaaacagacgcccgagagcctgagccgggcgcgatacggggcatggccgcactgcccggtggcggcgcggccatgcctgctcagccgtcattatcaggccagtcgaccgggcgcgggcccattcgccacatattcggcggctcacccaatgccgtgctctggtacatccaggcgccgcagcccgtgcagcgccagcggctgtcgaccttgcaccggttgctcatggccgcaatgccagaggcagccaggtgctcgtgtggcggcacgctggacggttcgcccaccagctgatgacacaggtcacaggcgtgcatggcatctcctgtcacggcgatgattgcgcggcggcgccctcagccattgtgctgcacccattgccgcgcccacgaaatcgccgcggcccgcgcatcttcgggcgtggcgtgcgtggccggcggcgcgccgccctccagcaccacggcgcccgactcccagatatcgcacagggccttgaaccgccccatgcccagcgcgtggcaatacacgtggatcacgaagccgccgtactccaccacgtcagtggcagtatcggtcagcgcctgatccgcggtgggatcggacggcaccagcggcacatcgggctggcgcagcacccgccgctccgcggccgtgcgcaccagcatggcgcaggcaccgcccatcgccgcgcccagcaccacgcccaaaccaaaccagcaagccctgctcccgcacctcgccatggcatcccccgcagcgaccctgccggtcctggcacgaccatgctgtgcgaccggcatcgctttcaggttataccaatccaggccgacaccgcctgccaccaacttcgacgcggcaatggcacagcgccgcagggtgtggcggcgcacgaaaatgagaatcgtcggggatgaccgaagcgctggccagagctatactgtacatccatacagtatccggatactgcccatgcccttgtaccagtccgattccatcctgctcgaggcctactacttcggcgacgactgcgaatccctgcgcctgccttgcggcagtgtctgcgtggacgccggcgccatcctcgtcgacggcatcgagccactccagttgcaggccctgcgctggacgccggatttcctgtccttcgacgcccagggcacccgtcaccgctacccggtcagccgccccgccctcgtcggccccggccaggcacgcttcgcactgctttaagctacggcttccgcatcgccgatgcgccacgccgcttgcccacatgccagacctcagcccgaccgccagccaactgatccgctcgctcgacctgcagccgcatccggaaggcggctactaccgcgaaacctatcgcggcgaagagcaggtcgtctgccaggacggtcgcacacgcgcagcctgcaccgcgatccactacatgctgtgcggcaacgactattccgcgtggcatcgcatccggtccgacgaactctggcactaccacgcaggctcccccgtggacgtgcaccggatcgtggacggcaccatcgtcacgcagcgcctgggcgacccgctgcggcatcccggcgcggccttccaggcaatggtgcccgccggccaatggtttgccgccgaacgcgtggatatggccgatggcgtggacttcgccctggtcggctgcaccgtggcaccagccttccagttcagcgaattcgaactggccgacgcaacggcgcttgccggcctggcaagcggacatgacgcgctgttgcgcaggctgacgcgctagtctccacccaagaaacagcccgccgcggtggggtgcgggcgggctggtgagtacagcgggaccagtctaagccagggtgccggcgggccatgacgggagaacctgggtatctcgccgcctttgctggcaacgaccgagcagcgcgtatagcccaacaggcactcaggatgcggattcatatcctgcagcacagataatcttgggctcacccattatttgcagctacaattattgccaaggatgtcagcaaccagtccaagcacggtgtttcgctcgcgctggcagcaaggttccactggccgagcctgttggcaggggtagatgacagggccgactacagagaactccgcgagatcggcttcggcgtcattgatgagcgcctctattgcgtggtgttcacccagggcgggaatgcaatgcatatcatcagcctgcgcaaggccaacaaacgcgaggcaaggaactatgtcgaccaagcctaagatcgtcgtgccgaccgacgaagaggacgcggccatcaaccgcggcatcgctgcggatccggacacgtacgaggtctcggcgaaagagatgcaggccatgaagccgctcggcaaacgcggccgcggtcgacccaggctcgccagcaccaaggaactggtgagcattcgctatgacgcggacatactggatgcattccgcgccagcggggaaggttggcagacgctgatgaacgcaacgctgaacgttgcgcttcaacaggccatggacattacctacgttgggggcccactgcatggaaccacggtccgtgacaaccccaacaccttgtcatccgttctcacctatcgcccggtaacagccttcgcgaacgaccctgcgcgtcaggcaacgtatcgtcgagtaaccctcgaacgtaccattggaaacaacgtcgaacgccgcgagttctttgtgagtgacagtctcaccgacagcgaagccgattccctggtccagcgagaagacctttggcctatgtcagagccacaccatgcctgagtattggatgcagtccaatagggcagcttggcaggctagccggagtcagccagcaccggccgcgtcaaccaagctgctgatgcaatcggcgacctgcccttcccaggcgtccgagtgcttgcgtgcgttgcgcatatatggcgcaagctccacaggaaaagtaaggacgacagcagcgatcgctatcgttgcaacaggttaggtagaaagcgggcctgcttttcgcagtaacagccagcgccgcgcatggcgggccgaaaggtcatgcacttatccacgcttgcattcgaccttctcttcatattcaccgtcgtccttccattcgcgctcgatcaggcaagggccgtcgcggtacttctgcttccgctcatagccacgcggaccgcccttgcatttgcgctcttccttgtattcgccatcgcgcttctgttcgcgttcgatttcacaagggccgctacggaatttctctttgtactcaccgccacgatatgcgctcgggtagccgcggtcgtcggcgcgtgcggcagccgcggccgtcagccagaggagcgcaagggtagccacacagagctttcggaacataagtggggaatcggtcgggaggatggcagagcatagcaacgggcatcggcgacggctgtatcaaagcgttaccgcaccggccggccatttccacgcagaaaataaaaaacccgcttggctattcaccaagcgggttttgtctggtcggggcgagaggatttgaacctccgaccacctgcaccccatgcaggtacgctaccaggctgcgctacgccccgaagcaaaagattataacagaagcatttcccgtatgactagctcccgacgtcgaaattatccgtgcttcgcgatctcccgcagttgcgcgagcaggtgctgcacttcgaccagttcattgcgcaggccgccgatgtcgaccgacaatgccgccgcattttcttcaccaacttctgcggcctcaggcgctgccgctgccccactgtgatgacggccttcatcgaggcgattgcgcgcgccgttgatggtgaagccctgttcgtagagcagttcgcggatgcggcggatcagcaggacttcatggtgctggtagtagcggcgattgccgcggcgcttgacgggcttgagttgcgtgaactcctgttcccaatagcgcaggacgtgcggcttgacggcgcaaagctcgctcacctcaccgatggtgaagtagcgcttggccggaatcggcggcaacgcgatgcgatcgctggatttgtccgacatgtggtgtgtagacgagcgtcaggccatgccggccatgcggttggcgcgcaccaggtgcgcgcccagaagcataccgatgccggcttcgggaagcaatccgccgttcgggtgacgcgtcagccgacgatgccggcgcgttcttccaccaggcccttgagtttctggctggcgtggaacgtgaccacgcggcgcgcggtgattggaatgacttcgccggtcttgggattgcggccgggccgctgcggcttgtcgcgcaactggaagttgccgaagccggacagcttgacgctgtcgccctgctccagcgcttcgcggatgacgtcgaagaaggcctcgaccatgtccttcgattcgcgcttgttcaggcccacctggtcgaacagcatctcggcgagttcggccttggtcagcgtgggaacttcggtcgcgcgcgcatccggcatagcgtcgtcaagggaggaagcctgccggtcgctcatctcacccagtgctgcagcggtcatggaattcgcgcctcgatcattcatgtcgatcgctcaagtgtgtgtctggcgatccgcccggggcaagcccgggcgcccttgtttatcgtgtgtccgtcgcgtacttgttgcgtactggcgatggcttagccgcgcagccgggcctggaaggcctctgtcagcgcgtcgaccatgcagcgcactgcgctgtcgacggtttcgtcctggagggtcgacccagtatcttgcaaggtcacccggaacgcaaggcttttctcgtccgcgccaatggcagcggaagcgcccttgggacggaactcgtcgaacaccaccaggctctggcagtagcggccgtagccctgcttttccagtgccgcgcgcatggcgtcgagcaggtcctgcacgcgcaccgattgcttcacgaccacggccaggtcgcgcacggcggccgggaacttggagatctcggtgtacaacggcaggccggtgtcgcgcagcgcgtcaagcgccagttcgaacactaccggggcatgcgtcagctcgtattcctgcagccagcgcggatgcaactcgccgaccacgcccacggccttgccgtcgagcagcacgcgcgcggcgcggcccgggtgcagcgccgggtgcgacaccggctcgaagcgcggcacgcgcggatggaacagtgcctcgacatcgcccttgatgtcgaagaagtcgacgttgcgcgcggggatgccccactgctcttcgaacgccgggccataggcaatgcccgcggccatcatcggctgatcgtagccggccaccgtcaggccgccatccttcacgctggcgtcgcgatggaacacgcggcccacctcgaacaggcgcacgcgcgcagccttgcggttcaggttgtagcgcaccttgtcgaccaggccgccgatcagcgtcgagcgcatcaccgccagctggctggcgatcgggttcagcaggcggatcgggttgtcgttggcggcgaagtcgcgctcccacttctcttcgacgaaggcgaagttgatgacttcctggtaatcgcgcgcggccacggcgtggcgcaccacgtggctggagcggcgggcctcgttggtcgggcgcatctcgctctcggcgatcggcggacgtgccgggatgcgctcgaaaccatagatgcgggccacttcctcgatcaggtcttcctcgatctcgatatcgaagcggtagctcggcggcgtgacttcaaacacctcgccctcggcgccctgggtgcgtgtgaacggcagctgcaggcgctggaatacatcggcgatggctgcagacgacagctcgatgcccagcacgcgctcggcgcgcgccacgcgcaggctgaccggcttgcgctgcggcaggttgaccacgtggtcgtccaccgggccggcctggccgccgcagatctcgaggatcagcgcggtgatgcgctcgatatgctcgaccgtggtggcgtagtccacgccgcgctcgaagcggtgtccggcatcggtcgagaagttgtagcggcggccacggccctggatcgcggcgggccaccagaatgcggcctcgagatagatgtccgtggtgtccagcgtcacggcggtgctgtcgccgcccatgataccggccaggctttcgatctccttgtcatcggcgatcacgccgacctgctcgtcgacctcgatggtattgccgttgagcagcttgatctgctcgcccttgcggccccagcgcacgtcgaggccgccgtggatcttgctcaggtcgaacacgtgcgacggacggcccagttccagcatcacgtagttcgagatatcgaccagcgcggaaacactgcgctggcccgagcgctccaggcgctgcaccatccatgccggcgtggccgcgcgcgcattcacgccgcggatcacgcgaccggagaagcggccgcacaggtccggcgccgataccttgaccggcagcttgtcctggatcgtcaccggcaccggcttcatctccggcaggttcagcgcggcaccggtcagcgccgacacttcgcgcgccacgccgtggatcgacaggcagtcggccttgttcggcgtcagcttgatgacaaagacctggtcgtccaggtcgaggtactggcggatatcctggccgaccggcgcgtcttccggcagcaccatcaggccaccgtggtcctccgacagcttgagttcgcgcgccgagcacagcatgccgtagctgtccacgccgcgcagcttgccgatcttgatctcgaacggcttgccgccatcctcggacggcggcagcacggcgccgaccagtgcgcacggcaccagaatgccgggcttgacgttgggcgcgccgcagacgatctgcagggtctcgccggtgccggcatcgacctggcacacgttgaggcggtcggcattgggatggcgctcggtcgacagcacgcgcgcgaccaccaccctgtcgaacggcggcgcgaccgagcccacttcttccacttccaggccggccatggtcagcgtgtgcgacagcgcgtcggtggagatcttttcagggttggcgaaggtgcgaagccaggattccgagaattgcatggcgcttctgatccggtaagtattctgtgtggtcgttgacgaggggacggcggcgcgtcaggcgaactggcgcaggaagcgcacgtcgccctcgaagaacaggcgcaggtcgttgatgccatagcgcagcatggtcaggcgctccaggccggagccgaacgcgaaaccgatatagcgctcgggatcgaggcccatgttgcgcagcacgttcggatgcacctggcccgaaccggagatctccagccacttgccattgccgaaggccatgtcgatctccgccgacggctcggtgaacgggaagtacgacgggcggaagcgcacctggatgtcatcgcgctcgaagaacttgcgcaggaagtctgtgtacacgcccttcaggtcggcaaagctgacgtcctcgccgatccacaggccttcgacctggttgaacatcggcgagtgcgtggcgtcgctgtcgacacggtaggtacggcccgggcagatcaccttgatcggcggcatcgccttgccggcgtacttctcgacatgcatcttggcgtagcggacctgcatcggactggtatgcgtgcgcagcagcaacagcttgtcttcgctgtcgcggccatccacgtagaacgtgtcctgcatcgaacgcgccggatggttgtccggattgttcagcgcggtgaagttcatccagtcggtctcgatctcggggccgtcggccacatcgaaaccgatcgagccgaagatctgctcgacgcgctcccacgtgcgcatcaccgggtgcaggctgccgcggctgaccgcacggccaggcagcgtgacgtcgatggcctcggcggccaggcgcgcgttcatcagcgcatcggccagcgcctggcggcgtgcctgcagtgcggcttcaacctgctgcttgatctggttgatgcgggcgccttccgtcttgcgggtttccgggtcgagcttgccgaggcccttgagcagttcggtcagcgcgccggtcttgcccaggaagcgggccttttcgttttccagcgtggcgttgtcgttggcagcagcgaaggcggcctgggcatcggcgacaatttgatccagatcctgagacatggcggcggtcgtgggatttttggcgtcggggccggtacgcaccggtccgacgtgggttggcactacgtgcggtgttcgtttcgaatgcggtctcggcaaccggatagcggcaactgaaacggcattcgaaataaaaacggggctcggtgaggagccccgtttcagcggaccttgcagtcggcggtcgaccttgcggtcggtgcttgcccggcagcgcttacgcgctgccgcagccggcatcaggcaacggtggctttcacctggttgacgatggcggcaaaggcaggcttgtcgtgaatagccatgtccgacagcaccttgcggtccagttcaatcgaggccttcttcagaccgttcatgaacacgctgtaggtcatgccatgctcacgcgtcgcggcattgatacgcgcaatccacagggcgcggaacacgcgcttcttgttgcggcgatcgcggtatgcgtactggccagcacgcatgaccgcctgcttggcgatgcggtagacattattgcgacggccgcggtaacccttggcagcgtcgatgactttcttgtgacgggcccgtgcagtgaccccacgctttactcgaggcatgtaattctcctttcgttttcgtcaggggttatgcgtaaggcatcatcgcgcgcaccgacttcaggttcgtctcatggacgtcctgagtaccgcgcagttgacgcttgttcttggtggtcttcttggtcaggatgtgacgcttgaaggcctggccacgcttgaacgaaccgttcggacgtgcagtaaagcgcttggaggcgcttttcttcgtcttcatcttcggcatgaaaaactccagctcatatgacatgcatgcaggtggacggctcacgccgacgcttgcaagacccgcatccacttgttgttgcacagcggcccttgcggaccgcgcgcgacttccgcacgaagcaacgccgggatgcctggcatcccggccgctgcaccgcgcaggaattacttcttcttcttgggggcgagcaccatcaccatctggcgcccttccatcttcggcatctgctcgacctggccgatttcttccaggtccgccttcaggcgttcgagcatgcgcgcgccgatttcctggtgcgccatctcgcgaccacggaaccgcagcgtgatcttggtcttgtcgccgtcttccaggaagcgcttcaggttgcgcagcttgacgttgtagtcgccatcatccgtacccggccggaacttgacttccttgacctggatgattttctgcttcagcttcgcctcgtgggcgcgcttggcttcctcgtacttgaacttcccgtaatccatgatccgggcgacgggcggaaccgcgttcggcgcgatctcgaccaggtccaagtccttatcttcagccagccggagcgcgtccatgaacttgacgatgccgagctgttcgttatcaacccctaccaggcgcagctcaggcgcgctgatttcccggttgatgcgatgacctttgtccgtagcgatgttgcgttacctcaagaagacaaaaaaacaagccgtgctcaccacccatcaggctttgctggcgacgtcgtttttcagacgctcaacaaacgcggagacgggcatcacacccagatccacgttgccacgggcacgcacggccacttgactggcatcccgctccttgtcgcccactaccagcaggtagggaaccttttgaagcgaatgctcgcggattttatacgtaattttctcattacgcaaatcagccttggccctaaacccttgtttttgcagcaattgcacgacgctttcggcgtattccgcctgcgaatccgcaatattcatgaccaccacctgctccggggccagccaggccggcagcgcaccggcgtggttttccagcaggatgcccaggaaacgctcgaacgagcccaggatggcccggtgcagcatcaccgggcgcttgcgcgaattgtcctcggagacgtattcggcatccaggcgctccggcagcaccaggtcaagctgcagcgtgccgcactgccacgagcggccgatcgcgtccttgatgtggtactcgaccttggggccgtagaacgcgccctcgcccggcagctcctcccaatccacgccgcaggcgcgcagcgccaggcgcaggccctcttcggcgtgatcccagatctcgtcggagccggcacgctggtccgggcgcagcgacagcttgaccttcacatccttgaagccgaagtcgtcgtagaccgagaacgccagttcgttgaaggccttggcctccgccacgatctgctcttccgtgcagaagatgtgcgcatcatcctgcacaaagccgcgcacgcgcatcagcccgtgcagcgcgcccgacggctcgttgcggtggcaggcgccgaactcggccaggcgcagcggcaggtcgcggtacgaacgcaggccgtggttgaagatctgcacatggcccgggcagttcatcggcttgatcgcgtagtcgcgcttctccgactccgtgacgaacatattctccttgtagttctgccagtggccggacttttcccaaagcgaacgatccatcacctgcggcgtacgaacctcatcgtagccggcgtccgtcaggcggccgcgcatgtactgctcgacggcctgccacacctgccagcccttcgggtgccagaacaccatgccgggcgcctcttcctgcaggtggaacaggtcgagcgtcttgcccagcttgcggtggtcgcgcttctcggcctcttccagcatgtgcaggtaggcttcctggtcttccttcctggcccaggccgtgccgtagatgcgctggagcatctcattgttggcgtcgccgcgccagtaggcgccggccaccttcatcagcttgaagaccttcagcttgcccgtggacggcacgtgcgggccacggcacaggtcgacgaagctgccttcacggtacaagccgatttcctggtcggcggggatcgaggcgatgatctcggccttgtacttctcgcccatcgactcgaacagcgccaccgcttcgtcgcggttccatacttcgcgcacgaccttctcgtccttgcgggcgagttccgtcatcttcttctcgatggcggccaggtcttcgggcgtgaagggacgcttgtaggcaaagtcgtagtagaagccgttttcgatcaccgggccgatcgtcacctgcgcttccggatagagctccttgacggcataggccagcaagtgcgccgtggagtggcggatcacatcgacgccatcggcgtccttgtccgtgacgatggccagctcggcatcgcggtcgatcctgtagctcgtgtcgaccagttggccgtccaccttgccggccagcgcggccttggccaggccagcaccgatgccctgcgccacttcggcaaccgtcaccgggccgggaaactcgcggcgggacccatccggcagcgtgattgcgatcatttcgactctccaggattccgccggcggcgtcttgcgcttcgcccgagcggatcaaactgcatcttgtggcaccggccctgcatgcctgcgggaccggcgatttattctttgctgccctgccctgccgcaccggaaacgcggcagcttatcaggacgctgacaggcgacagacgaaaaaaaacgcggccaaggccgcgtttctctttgtcaaacccgatccaaccgggtcgaaggcgcacctcgactactgtcgcttgccagcggtagtagttcgcggtgtcataaccatgatgcgcttccgttccgtatggggttgaatcggacttgccacacttcttttactgctttactgcaattcgttggtaggctcgattggactcgaaccaacgacccccaccatgtcaaggtggtgctctaaccagctgagctacgagcctagcgaagccgcaagtatagcatcactttcttttcgcctgcaacaccccctggacgtcttcgatcaactgcagcgcgcgctgcagctgcgtagcctcggacacttcggcagtgaactgcatgcgcgcaacgcccttgctggagagcgtcttgacgccggtgacattgatcttctcgcgcgacagcacttcggagatatcgcgcagcagcccctggcgatcgatcgcctcgacatggatatcgaccggatagaccgcggcgtggctcttctggccccactcggtctggatcacccgctccggcgcgcgcccggccagttgctggaaggtgtggcagctgcgccgatggatcgacaccccgcgcccgcgcgtgacaaagccgacgatgtcgtccggcggcgccggcttgcagcagcgcgacatctgcgtcatcagcgaatccacccccaccaccagcacgccgctcttggcgccgcgcgccacgctggtggcgcggctcttcttggtgacagcgtcttcctcgctcagcggcgcctggacctcgccctccgggtgtcgcagcgcgtgctccacgtggcgcagactgaactcgtccttggccactgccgcaaacaggtcctccggcgtcttgaagcccagccgcgtggccaggtcttccagcttgaccgcggtcttgccttcgcgctgcagggtcttgtcgatcagcacgcggccctgggcgatggtctcctgcgaatcgagcgcattgaaccaggcccgcaccttggcccgcgcgcggctgctggccaggtagcccaggtccgcgttgagccagtcgcgcgacggtccgccctgcttgaccgcgatgatctccacggtctggccgttcttcagcggcgtgttcagcggcaccatggtgccgtccacgcgcgcgccgcggcagcggtggccgagatcgctgtgcaggtagtaggcaaagtccaccgcggtggcgccctgcggcagcgccaccacgcgcgcctgcggcgtcagcacgtagatgtggtcgtcgatcgcggcgtgcttgatctgctcccacgattcatcgtgcgccacgctgtggtcggcatcgtccttccacgccagcagctggcgcagccaggcaatcttctcgtcatagcgctcgctggcggagaactgcccggcatagccgcggctgcccgcttccttgtagcgccagtgcgcggccacgccgtattcggcaaagtggtgcatctcatgcgtgcggatctgcacctcgaaggcgcgcccgtcatcgccgatcaccaccgtatgcagcgatttgtagccattggccttgggccgcgagatatagtcgtcgaactcgcgcgggatcggctgccagatatggtggacgatacccagcaccgtgtagcagtccttgatatcgtcgacgatcacgcggaaggcgcgcacatcgtacaggtcggcaaaatccagctccttgccgcgcatcttcttccagatgctgtagatatgcttgggccgcccgctgacctcggcacggatgccggcagtcgccagctcggactgcagccgttcgatggcgccgccgatatagccttcgcgctcgatgcgcttctcgtccagcagtttggcgatgcgcttgtaggtatcgggctgctcgaagcggaacgccaggtcctccagttcccacttcatctgccagataccaaggcgattggccagcggcgcgtagatgtccagcgtttcgcgcgccacgcccggctgcggcgcctgcttggtctcggccagccagcgcagggtctgcagccgcgaggccaggcgcaccagcaccacgcggatgtcctgcgcaaacgccagcagcatcttgcgcagcgcctcgacctgttcgtggcgcgcctgcgcttcgttcttggacggcgcggccggctcggcctcggggcggctgccggcgatggcaccgatgcgcagcagctgccgcacaccgtcgaccagccgtgccacctcgtctccaaagcgcggtgcgatctcggcctcggtaccgggcacgaaggccaccagcccgaacaggcaggcggcggcacgcgcggcgtcgtcgacgcgcaggccgtcgagaatgcgcagcatgccctgcgcgtgcgacagcacggtctcgccggtgggcagcgctacctcggcaccatgctcgcgcacgtaggccagtgcgcgttcgaccagttcggcatccggaatgcccgcgacccgaccggtcaggtcggtggacgtcaccatgtcacaacgcctgcatcagttgagcgcagcggtcaccaccacttcgatcaggtaatcgggattggccagacgggcttcgacagtggcgcgcgggggcgtgttgccttgcggcacccaggcgtcccagacctcgttcatctcgccgatctggtcgacattggtcaggaagatctggcacgacaggatgcgggtcttgtcgctgccggcctcggccagcagccggtcgatatggccgaggacctcgcgcgtctggccgcggatatcggccttgggatcgacctcgggcacctgaccggcgagatacaccacgccgttatagaccgcgtattcggacaaccgcttgcccacatgggcgcgcttcagttcaaggttactcatgacaatgcgttgactgataaaaacagggccggcatgcgatgccatcaggccccggtaaagaactgcggggcgatcgcaatctgcgccggatcgacaaaggtcggggcatggcccacgtcgggcacttccaccgaactcacatgcttgccgcgcgccaccatttcggccacggtctcgcgcagcagcaggtccgactgcgcgccgcgcaccaccagcaccgggccttcgatggcctcgaagctgcgccagagcgcggcctcgccggcagcaatggcctcgggcgtggatttgcggaacggcaccgccagctgcggatcgtaatgcaagccccattccaggccgtccgtgccctgcaccggtttcaggatggcggcgttgagctcgcgccactgctcgggcgtatggcggccgaacgatgcgctgatggtttgcaggtaggccaggccttcctcgaaggtcttgaagcgcaccggcagccccaggtaggcgccgatccgttccaccgccgacggcgccagcttcgggcccacgtcgttgagcagcagcttgcgcaccggcgacttcggcagcccggccaggcccatgccgatcagcccgcccatcgaggtgccgaaccagtccaccttctccacgttgagccgcgcaatcagcgtgaccatgtcggacacatactgcggcaccacgtagccgttggcatcggccagccattccgagcggccgcgcccggccacatcggggcagaccacgcggtagtcgccgcacagcgcgctggcgacggtgtcgaagtcgcggccggtgcgcgtcagcccatgcgcgcacaccagcacgcgcggattggcggggtcgccccactcgtggtaggccatgcggtgcaggcccgccggactgatgcactggacaaaaccgagacgcggactggcagacatctggactccctgacgaaccggaccgcggaccgcaaaaagacggcgctgccggaggttgagcaaagctggattgtacgccgcagcgggtacaatgccacagcacagtgtcagcgtcccgcgtgcgcggccgcgcaccgccacggcgcgctccgccaaccctgtggcaacctttctgtggcattcctttctctcgacggaggcttacatgctcaacggcaagaccgcactggtgactggctcgaccagcggcatcgggctcggcatcgcgaaagcgctggcggcccagggcgccaacatcatcgtcaacggctttggtgacgcggacgccgcaaaggcagaaatcgcgcaggccggccaggggatccgggtcggctaccacggcgccgacatgagcaaggcggccgagatcgaagacatgatgcgctacgcgcagtccgacttcggcggcgccgacatcctggtcaacaacgccggcatccagcacgtggccgcgatcgaggatttcccgcccgagcgctgggacgcgatcatcgccatcaacctgacctcggccttccacaccacgcgcctggcgctgcccggcatgaagcagaaggactggggccgcatcatcaatgtcgcctccacccacgggctggtggcctcggcgcagaagtccgcctacgtggcggccaagcacggcatcgtcggcttcaccaaggtgaccgcgctggaaaccgcgcagaccggcgtcaccgccaacgcgatctgcccgggctgggtgctgacgccactggtgcagaagcaggtcgaagcccgcgcgcagaaggaaggcattccggtggaacaggccaagcgcgagctggtgctggagaaacaaccctcgggacagttcgtcacgcccgatgagctgggcgcgctggccgtgttcctgtcgtccgaagcggcccgccaggtccgcggcgcgatctggaacatggacggcggctgggtggcgcagtaaggagcaaacgatgcaacgacgcagtttcctgcgcgcgctggcgctgggcgcggtctcggccggggcgctggcaccggtggccggcgcgctggcgcaagccgccaagccgcttgccatcgacgtctacaagagcccgctgtgcggctgctgcgaggattgggtcaagcacctgcgcagcaacggcttcaccgtgacggtgcatgatgtcgaggacaccggcgtgtaccgcaagcgcttcggcatgccggaacgctttggctcctgccacaccgggtatatcggcggctacgccatcgagggccatgtgccggcggcggatatccgcaagctgctggcagcaaaacccaaggccgtcggcctggccgtgccgggcatgccggtcggctcgcccggcatggaacagggcccgcgcaaggacccgttcgacgtgctgatcgtaaaagcggatggcgccgcttcggtgttcgccagctacaacaagcaggcaggctgacctgcggctgccgggcggcagggtctgcgccttgccggagagcagccagcttagtgcgcagcgatattgccgggctattcgccggaagagctagggaatgcagccggctggcgtagcccggccgggcaattccaaagcgaagcgacccgacaaaaaagcccctgcggcgcatcgcacctcaggggccctgccaggcttcggagctcagcccgcttacagcagcggagcgccagtcttggcctggatttcctcgcggctgacacccggagccgtttccaccagcttcaggccttcgtcggtcacgtcgatcacgcccaggtcggtaatgatgcggttgaccacgcccacgccggtcagcggcaggttgcagtccttcaggatcttgatgtcctcggtgccatccttcttcttggcggtgtgttccatcagcaccaccactcggccgacgccggcgaccaggtccatcgcgccgcccatgcccttgaccatcttgcccgggatcatccagttggccaggtcgcccttttcgctgacctgcatcgcacccaggatcgccaggttgatgtggccgccgcggatcatcgcgaacgagtcggccgacgagaagatcgacgagcccggcagcgtcgtcacggtttgcttgccggcgttgatcatgtcggcgtcgacttcgtcctcggtcgggaacgggccgatgcccagcagtccgttctcggactgcagccacacttccatgccttcgggcacccagttggccaccagcgtcggcaggccgatgcccaggttgacgtagaaaccgtcctgcagctcggtcgcggcgcgcgcggccatttcgtcacgtgtccatgccatgatgcgtctccttagctggccgcgcgcacggtgcgctgctcgatgcgtttctcgggggtggtgttcagcaccaggcgcttcacgaagatgccggccaggtggatttcatccgggtccagctcgccggtctcgacgatatgctcgacctcggcgatggtgaccttgcccgccatggcgcacatcgggttgaagttgcgcgcggtgcggcggaacaccaggttgccggccttgtcagccttgtatgccttgaccagcgccacgtcggcggtcagcgaacgctccatcacgtactgctggccgtcgaattcgcggatttccttgccttcggcgacgatggtgccgacaccggtcttggtgaagaaggccgggatgcccgagccgccggcgcgcagcttctcggccagcgtgccttgcggggtgaattccagctcaagttcgcccgccaggtactggcgctcgaactccttgttctcgcccacgtaggacgagatcatcttgctgatctggcgcgtggccagcagcaggcccaggccgaagccatcgacgccggcgttgttggagatacaggtcagctgcttggcgccgctgtcgcgcagcgcggcaatcagcgcctcggggatgccgcacaggccgaaaccgcccacggcgatcgtctggccgtcgcggacgacgcctgcaagcgcttctgcggcgctggcgtagaccttgttcatgcttcgctccttcctcggtagttccctgtcgctcttcccgccaccgggttgtgcggcgggcgacgcagggaaattgtaacggtacaatcggcaacaggcgggcgacagtcgccgcaactcgtccgaccgacagcatacgcaagcgcagccggctacgccattacgtaaaaatacataagcagatgcccgcaatcgactaccagaccgccttccagctcgcccccgtgggcctggtgctgtcacgcgaacgcgtgatcgaggactgcaacgaggaggtctgccgcattttcggcaccacgcgcgaagcgctgctgggccagtccttccaggtgctctaccccaccgccgacgaattcgagcgcaccggcgcgcgcatcgcgccgatcatgggcaagcgcggcatgtactcggacgaacgcatcatgaagcgcgccggcggcgagctgttctggtgccatgtcaccgggcgcgcactggaccgcacgcaaccgctgggcgcggggatctggaccttcgaggatctgtcgcagaagcgccaggtcactgcggagctgaccgcgcgcgaacgcgagatcgcggcgcagctggtggagggaaagaccagcaagcagatcggcaagctgctggcgatcagcccgcgcacggtggacatctaccgggcgcggctgatgaagaagtacggggccagcacgtcggtggacctggtgcagcggctggtcaaccactgagccccgtggcaggcatcagccctcgatgatcgcgcggatctctgccggcaccggcaccgacttctcctgcgtgtaatcgcaccacaccaccttggccccgccctcggcccagaccacgtcgggctggtcggtgcggcggatttccatgcgggtctcgaagctggtgcggccgagctggccggcgtagacgcggcactcgatgtcgcccgggtagcgcagctgcttcaggaaagtcatgtgcgcattgatgatgaccggcccctgcccgcgtgcatccttgccgccgcggcccagcgacgcgaaccactcgatgcgcgcctgctccaggtactggaagtagacggtgttgttgacatggcccatggcatccatgtcgccccagcggatcggcatgaccaccgtatagacgtgcttcatcacagcctccaaaagaacaggcccgccgggtctggcgggccctctgcttggctcagcgcttggcgatcgcgccttcggccttggtcaccaggtcggtgccgatctgcttcttccacttgtcgtagaccttggcggtggccttgcggaaggcgtcatgctcggccggcgtcaggtgcgtgaccttgacgccgtgcgcctccatgtccttccaggccggcgcgcccggctcggccaggcccttgcgggccagcgcgatttcctgcttgccggcgtcgacggcggcctgcttcacgatctcgcggtcggccggggtccagctttcccagatctgcttgttgaccacgaagatcagcgggtcagccacgtagccccaggtggtgacgaacttctggcccaccgtgtacagcttggcggcggcgaacaccgactgcgggttctcctgcccgtcgaccgcgcccgaggccatcgccggctgcgcatcggcccagctcatctgggtcgggttggcgcccagcgcgttgaaggtctcgatgtacagcggcgaaccgaccacgcgcagcttcatgcccttgaggtcttccggcttgcggatttcgcgcttggagttggacacctcgcggaagccattctcgccccaggccagcggcaccacgccggctttttccagcgtggcgaagatcgacttgccgacttcgccctgcgtgagcgcgtccagcgccttgtagtcgggcatcaggaacggcagcgagaacaggttcagttccctgacctgcggcgaccagttgatggtcgagcccaccgccatgtcgatcacgccctggcggatcgccgagaactcgcgggtctggtcgccggccaccagcgaggtgcccgggtacagcttgatattgatgcggccgttggtgcgctgcttgaccaggtcggcccagatctcgccgcccttgccccacgggaaggccgggccgagcaccagcgacatcttgtactcggacttgtaggtctgggccattgcgccggcgggggcgaaggcggaagcggcaatggcggcagccgttgcgagcatcagggcacgacgtttcatttcatctcctctcgggaaagcgtcaattcttgtttgtgaatgcggaacatcagtagccgaggtactcaggcagccaggtcgccagcggcggataggccagcaccatcagcatggcgataaacatcgccagcaacatccagatcacccagggcacggtctcttccatgcgcacccgggcaatccggcacgacaccatcaggttcacggccagcggcggcgtgaactggcccagcgccaccttcagtgtcagcaccacgccgaaccacaccgggttccagtggaaggcattgacaatgggcagcagcagcggcacgaagatcaggaagatcgagatgccgtccaggaacatgccgaccgtcatcagcagcagcacgatcagcgccagcacgccgtactcgcccagcccggaattggcgatggcgtgcgccagcgggtcgatcacgcccagcgtcgacagcgcataggcgaagatgccggccagtgccaccaccagcaggatcactgccgaggtctcggccgcctcctggaagatggtgaacaggtcgcgcatgccgatgctgcggtacaccaccatgccgacgaacaggccgtagaccactgccaccacggcggcttcggtcggcgtgaaccagccggcgcgcatgccgcccaggatcaggaacggcgccaccaggccccatgcggcctcgcgcaggctcttccagaacggcgggcgcggcagcgcggcttcgatcgcgcccatgttgtgcttgcgcgccagccacacggccggaacgatcagcgccacgccggccaggatgccggggatcatgcccgcggcgaacaaggccggcaccgatgcgccgggcaccagcacgctgtagatgatgagggccaccgacggcgggatcaggatgtcggtcgcggctgccgcgccgaccaccgcggcactgtacgaacccggataaccggcgcgcgacatcgccgcgatcatcacgccgcccaccgcggccgcgttggccgggccggagccggagatgccgccgaggaacatcgccaccaggatcgccaccagcggcagcatgcccgggccgcggccaacgatggcgatggcaaaggtcaccagccgctgcgccacgccggagcggtcgaagatcgaccccaccagcacgaacatcgggatcgccagcagcggatacttggccagccccgcatagaagttctgcggcacggccagcaggccgaacatctgggtgtcgagattggacaggccgatggcaaccaggccgcccaggcccagcgacacgccgatgggcacgcccagcagcatcaggccgataaagaccacgaacagggtgatggcgacgaacgtcattgcgccttctccgtcgtggtggccttgccttcatgcagcgccttgagcgcgcgcacgttgcgtagcaccagccccagcgcgcgcagcgcgatgccggcagacagcaccggcagccagatcgagtaccaccagctcggcacgccgatgcccggcgaggtctcgccgaaggtgtactcatcccaggtaatgcgtgcgcccagcaccgccagcgcgatgaacatcaccgccaccgccagcgccgacaggatcgccaggcggcgctggcgggccgcgctgccgcgctcgaagaagaattcgatgcggatattgcgatcgcgtgccaccgcggcgctgccggcgaccagcgccagcacgatcatcaggaagaccgagaactcctcggtccaggcaaatgactcgtcggtgaaatagcggaccaccacgttggcgaaagtgatgccgaccagcagcaccatcacgatcacgccaacccagtcctcgatgcggggcgatacccggaaatcagcgtcctgcgcttcgtcggcggcctgcgggatcaccgcggaatcgacgacgtgttgcggcacggcgttgcgccgtgcctcttcttgttgctccatctccccggcctccggtccgggccgctcgggccatgcggccaccgcggcgtttttttacttgtatgtaaagacttaatctgcagacatggcggattatgccaagactggcccgccacgcacgaattttctgatgattgatgtgtgctgacgacggcgcacccaaggggaccggataagccctgggcgtgcagtccgggcatcccgcggcgcttttggcgcgcagccgggatgcagggggccttgcgcccccccggtcagcgatcaggcggtcagaccatgccgtcgtcggcggtgatgacagcgccgttgatgaactgcgactggtcggatgcgagcagcagcaacaggccgtcgagatcctccggcttgcccaggcgcttgcgcggcagcatctggatcagcttctggccggcgtccgaatcccagtggtggtggttgatctcggtatcgatatagcccgggcagatcgcgttggtattgatgccatggcgcgcccattccagcgccatggccttggtcatgtgcaccacggccgccttgctcatgcaatacacgccgatctgcgacagcaccttcagccccgccaccgacgcgacattgacgatccgcgcctgcggcagcgggctgccgttgcgctcggcgcccttggcgcgcgcgatcatgcgcttggccacttcctgggcgacgaagaaggcaccgcgggtattggtgtcgaacacgaaatcgaagtcgtcggcggtcacatcggtcagcttctgcgtggtcgacacgccggagttgttgaccaggatgtcgatggagccggcctcagtctccgcatgcgccaccgcggcgcggatgctgtccgggtcggtgacgtccagccgcaccacatgggcgctgccgccctcggcctcgatcgcagcgcgcagttccttgagccgctcggttcggcgcgaggccagcaccaccttggcgccggcggcggccagcaccgtggcgaaacgcgagcccagcccgcttgaagcgccggtgaccagcgcgaccttgccttccagattgatcgacaaacccatgattacctcttgtgcgggagctcctccggcctattcgggagcagaaggcagcatatcaaaaaaagaacgaccgttccaaaaaaatccttgcctgtgggtggcgagtcccggacaatgccggagattctaagaacttgaccagcaaagggaaagagggaaaacgcgcgatccgggagtctttggaccccaaatcgctgccaactcacccatccgcggttcccgtccgcgcgctggcccggttctcggcaaaacgatcaccgcatttcccacaattgcaagcaagcagcaaagaaatagagggttagagacaatggatcagcaacagctcctggagcagttcggcccgcgcgaagccatggaatacgatgtggtcatcgtcggcggcggccccgccggcctggccaccgccatccgcctgaagcaactcgcgcaggagaaaggcgccgacgtcaacgtgtgcgtgctggaaaagggctccgagcccggcgcccacatcctgtcgggcgccatcatggacccgcgcgccctcaatgaactgatcccgaactggaaggaactgggcgcgccgctgaaccaggccgtcaccgaagacaagttcctgttcctgaacgagtccggctccaagggcacgcctccggccctgctgccagagtgcttccacaacgaaggcaactacatcatcagcctgtcgaacttcgtgcgctggctgggccagcaggccgaggcgctgggcattgagatcttcccgggcttccccgccgccgaagtgctctacaacgaagacggctcggtcatgggcgtggccaccgggaatatgggcatcaacaaggaaggcgagcccaccgacaacttccagctgggcatggaactgcatgccaagtacaccatcttcgccgaaggcgcgcgcggccacctgggcaagcaactgatcgagaaattcaagctcgatgccggcaaggatccgcagagctacggcatcggcctgaaggaactgtgggagatcgacccggccaagcacaagccaggcctggtggtgcacaccgccggctggccgctcgaccccgccacctacggtggctcgttcctgtaccacatggaagacaacaaggtcgcggtcggctttgtggtcggcctggactacactaacccgtggctgtctccgttcgaggaattccagcgcttcaagacgcatccggaaatccgccagtacttcgagggcggcaagcgcctctcctacggtgcccgcgccatcaccgccggtggcctgctgtcgctgcccaagaccgtgttcccgggcggcgcgctggtcggctgcgacgccggctacctgaacgcctcgcgcatcaagggcagccacgccgccatcaagaccggcatgctagccgccgaggccgtctatgacgcgctgcaggccggccgccagcacgatgagctggccgcctacccgaccgcgttcgagcagagctggctgcacaaggaactgctgcaggccaagaacttcaagcagtggttcaagaagggccgcaccaccgccacgctgatgaccggcatcgagcaatggctgctgcccaagctaggcatccgcaacccgccatggaccatccaccgcgtgaagccggaccatgtgtacctgaagcccgcggccgagtgccagaagatcgagtatccgaagccggacggcaagctgaccttcgaccgcctgagctcggtgttcatcagcaacaccaaccacgaagagaaccagccggcgcacctgacgctcaaggacgccagcgttccggtcaacatcaactgggacaggtacgccggccccgagtcgcgctactgcccggcaggtgtgtatgagttcgtgcaggacgagacgtcgggcaaggaacgtctgcagatcaatgcgcagaactgcgttcactgcaagacctgcgacatcaaggatccgacccagaacatcgtctgggtgacgccggaaggcggcggcggtccgaactacgtcgggatgtaagcctgccgcgccagcggcagaaaaaacggcaccggaaacccggtgccgtttttctttgggcgatgcagcgcggctatcgtgcctgccgccgcgcggccatcgccttgtcgaccacctcggcctgcagcgcctcggcgggattgccgaaggcctggctgcgcagcgcatccagctgctgccggcggtcctgctccgacaaccccgggaatgactcgatctgctcgcggcgcgcggcgtagtcgtcgtagcgctgccgccaggcctgcccggcttgcgcctgctgctggtagcgctgcgccacctcggcaccgtaggcctgcgccaacgccgcaccgatgtcctgcgcactgcggccggcggcctgcatgccggcgatggtgtcgctgatcgcctgcggacgcgcgctggcctcccgtgccgcacgcagtggctcgggcagcgtggcttcgagttcggccagccgctgccgccgctgcgcgtcatccaggccggattgtgccgcgatgtccagccgcgccagcatggcatcgtcatacacctgctcgtcgccgaaccagattgccgccacctccggcagcaggtgctgccgcgcgccgttacgcccggcctgcagcgcgcgcaactgctgcacttgtgccgcatccagcgtgccgttcgtatccgcccgcggcttgcgcgcggccagcgcttgaatctcggcaagataagccaggtagcgctgccacagctgccacgcctgccctgccgcgggctgcggcacgcggcggcggatatcgtcgtacaccagccggtccagcgcgtcggcgccgccggcgtcgtggcgggcgctgaggaagtagtcgaagtaggtgcgcagcgcgcgcgtcaggcgcaggttgccttgcgcgtcgagttcggggcccgcgggcacgtcgacgccggacagcgatggcaaggcagccacgccggcgggtccggcgtcagccgatgtcgccgaaggactcgcagcggtggtgatcgctgccgggcgctgcggcacggcaaccgggccagacggcatcgtcagccagtacaccgcggccgccgccgcgccggccggcagcaaggccagccagggccgcggcgagcgctcagagctggtcattgcgcagccggttggcgtggctgagaatgaccgtgcgcggatcgacgtcctggtacaggccggccatctggttcacctcgtcgagatggttccagtagtagcccgtggccagcacccggccccacttgctgctgcagaccgagaccagcccgtcattggggccggcgcccttcaggtccatcagcccggccgacgccgacatcatcaccgtggtcggatccagcaggttggagcgcagcaggctgaacggcccaccctgcccggtccaggaatacgcggcctgggtatgggtgacgaagttgcccgcggcatcgcgcgcctgccgttgctcggacaccgcgccagcagtattgcaatccggccccagtgccgatttcgtgccgggcaccagcgtggcatcgaggcgcgcattctgctcggcggcgccacgcgtggtcaggatcttgagcgaggccagcgcatcctggtccagcgcctgcccgttgccgatgccgttgaaccagcccactgtatcgagcacgccctggatgatgccgacgagtaccggcccggcgatcggaatactgttgacgccattgatcaggtccagcacggtgtcggccacttcgctgccgcgatgcgggctgccgatggtggtgaccgaggccacgtcctgcggcgacatcgccgccagcatgcgcgaggtcggcccgccctggctgtggccgatcaggttgaccttgtctgcgccgctttccagcttgaccgcgcgcacataggcctgcagcgccagggcgcgctcttcgtcgctgttgaacgacggcaccgtggccacatagacttgcgcgccgttggcccgcagcacttcggggatgccataccagtagtcgagcacaccacccatcctggccgcgccggtcagtccgtggaccagcacgatcgggtaacgcgtcttcgcgtagtcgccgctcgcggccagggctggtgctggctgcgccagcatggccgctgcgaccagcgtggctgtgcctgcgagcctgcgcaaggccttgccggccttctgctcgcgtagcgcgggcgtgcgtcgtccgcacgcgtggtgtccgctgtgctccatcttgtctcctcggtggtgggtctttttatgttggaagcagtaaagactggccgccccgacgagacaatcaaaacattagcggattccctctaaacggccgctacagccgcgggctgcaagggcatgcgggtgctggaaagcagctgttcgtagatgtagcactgcagcagcgtcagctcgcgctcggccagcacgtcgaaggccacgccgaaggccggaaagtcggcatcgtcgctggccgcgccggggggcgcgaggcggatccagccatcgatggtgacctcgctgtccagtgacgccgtgcgcatcttgaagcgcagccgcacgcggctgcccggcgccggcgccggcgcggtggtctgcaccagcgcgccaccggtgctgaggtcggacagcagcgccagccgcgccgtgccggtgtcgatgtcgtcgtcatcgccgggctcggtcaggtaggcggccagccgggttggcacgcgtgcagccttgcgtaccggcattgcgtgcttctgcaccggcgccgacagcaccaggtagcgaaacgggctgcggcacacggcggtgatggtcgaggtgaagctgtggatggcgtgtccggagaagccgcgcagcagcacggcatcgcccgcctgcagcggcaggtcgcgcccgccgagctgcggccaggtgacaaacaggccctgctcgataaaaccgatcaggcggctggcggccgggcgcgcggcctcgccctcatgcttgacatgcagcagcgtgccgacctgcaggccaagcggcccggtggccggacgcagttcgtcatcggcatcgtcgtggccatcttcgcgacagaccacgccatggcggaacaccagcgccaggtcgcgttcatcgggaatgacactgccgctgccgagcaccaggttgccctcgccatcgagcaatgaccagggcagcgggtatccgacgggaagatcgttaggtgtgagctggatcatggctgttcgcagtaggccccggcattagatgggggcatggcaagccttgggcggagccgacgcgcaggatccgccacctgtatcagacttctatcggcgccggagcggcgaaattaagccctcggcgattgaccagagtcgcatgtgtagcattcactccctacggagaccttgacgcctcgcaaagttaggccgaaaatcaacaaaagctgtctgacagcctgacatatcaaaaccatgaccatcctgccccgcccggcctcgctcgccagccgcatcgcccagaccctgcacgacgacatcctcgccggccgctacggcgcgggcgcgcgcctgccggccgaggccagcctggccgataacttcggcgtgagccggccgatcgtgcgcgaggccatcgcccagctgaaggccgatggcgtgctggtgacgcgcaagggctcgggcgcttatgtgtcggagaccccgggcggcaaggcctggcgcgtggccagcgcgcccgacggcggcccgacgctggcgcagctgttcgaactgcgccgggtagtggaaaccgcctgcgccgaaatggccgcgcagcggcgcacggatgccgatatcgatgccatccgcggcgcactggcggcgatgcaggcacaggccgacggccagggcgacatggccagcgcggcggcggccgacatggccttccaccatgccattgccgaagccgcgcacaacccctgctttaccggcctgaccgatttcgtcagccagcagatgctggccgcgcgccagcgcgcctgggagaacaccgcgcggctgagtgtgacgactggcgcgccgcgcgccgccgaccaggaacatgcggcgctggccgaagcgattgccgccggcgatgccacggccgcccgcagtgccgcgcaacagcaccttgcggccgccgccgcccgcctcggcctgacggcctgagcctccgaacacacagactttgaagcaaggaacaaccatggaaacagtggattgcgtcgtcatcggcgccggcgtggtgggactggcggtggcgcgcgcactcgcgctgcagggtcgcgaagtgatcatcctggaaaccgagaacgccttcggcaccatcaccagcgcgcgcaacagcgaggtcatccacgccggcatctactatccggccggctcgctcaaggcacagctgtgcgtgcgcggcaaggccatgctgtacgactactgcgccagtcaccacgtggcgcaccagcgctgcggcaagctgatcgtggccaccagcgaggcccaggtggcaacgctcgaaggcatccgcgccaaggcggcggccaacggcgtggacgacctgcgccttgtcagccgcgccgaggcgcaggcgctggagccgcaactgcagtgccatgccgcgctgctgtcgccgtcgaccggcattgtcgacagccatggcctgatgaccgcgctgctgggcgacgcggaaaacgccggggcgatgctggcggtgcagtcgccggtgctgggcggcgcggtgacggcggacggcatccggctggagatcggcagcgaggatggcagcgccaccacgctgctggcgcgcacggtggtgaactcggccgggctgaccgcgccggaactggcgcgccgcatcgacggcatgcccgagacccatatcccgccgcagtactacgccaagggctgctatttcacgctggccgggcgcgcgccgttctcacggctgatctacccggtgcccgaggcggccgggctgggcgtgcacctgaccatcgacctgggcggccaggcgcgcttcggccccaatgtgcgctggatcgacgagatcgaatacggcgtggacccggccgacgccgacggtttctatgacgaagtgcgccgctactggccggggctggccgacggcgcgctgcaacccggctatgccggcatccgccccaagatcagtgggccgcacgaggttgccgcggacttccgcatcgacggccccgccgtgcatggcgtgccggggctggttcacctgttcggcatcgagtcgccagggctgacctcgtcgctggcgatcgccgagcgggtctgcgcggcgctggcctgagcggcgccatcgccttccgcgcggaagctcatcaccgcacagaacgcgccggccgccgcggcaatggcggccagcccgaaggtatgctcgggcgccagcgcgttccaggtccagcccatcgccagcccgcccagcgtgccgccgacgccgtaggaaatgcccgtgtacagcgcctgcccgcgcccctgcagcggcccggcaaaccatgcctgcaaccgcttcaggctggcgctgtggtgcgcggcaaaagtggccgcgtgcagcacctgtaccagcgccatgagccaggcaaactgggcaaggtagccggtcaggccgaagcgcagcgccgccagcacgaaggtgccggccaggatcgtgcgcagcgcatagcgcgcgaacagcaggccctggtagtagaagaaaacgatctcggcgaccacgccgatggtccacatcacgccaatggcgaacttgctgtagcccagctgcgccagccacagcgaatagaacacatagagcgcggcgtgcgcgaacatcatcaggaaggctgacgccaggaaccaggccacgtccgggcggcgcagcagcggcaaggcgcgcggcggcgccgtgcgcgggccgtcgtcggcggcgtcatgcatggtcagcaccacgccggccaggatcgccagcagcgtgctggccacccacgggaaggcgcgcatgccgaccgcttcgaacagcgccccgccggccagcaccgcgccgataaagccgaccgagccgaacatgcggatgcggccgtagctatggtcgaaggcgccgtagcggcgcagcgtggagatggtcagggcatcgcccagcggcgacatcgcgctggtgagcaggctcagcgtcagcatcatcgccatcatgccgccgtagctgcccacacccggcagcatcaggaaggccagcaacgaggtgaacgcgctcacgcgcaggatgcgcacgcgcgtatgcatcacgtcggacagccagccccacaggtagggcccgacgatgcggctgacctggaagctcgccatcagcacgccgatctgcaccgggttgaagccgcggtcggcgaaatacaggctgacgtacggcgagatcaggccgacgtagccgtagtagccaagatagaagagcccgaaacgggcgtagtcggggcggccggcgccggtggcaccgccgcccgcgaaaggcgtggccaacgcgaggtcaggtcagggggtctggccggcctgcgcgggaatgcgcggcgtatcgaccttgacgtcgccgcactgggcacggtggcgcagggcgtggtcgatcagcaccagcgccagcatggcctcggcgatcggcgtggcgcggatgcccacgcacgggtcgtggcggccgaaggtctcgacggtggcggcattgccggccttgtcgatcgattcacgcggggtgcggatggaagacgtcggcttgatcgccagcgacacggtgacgtcctggccggtggagatgccacccagcacgccgccggaattgttggtgcggaagccctcggcggtcagctcgtcgccatggacgctgccgcgctgggccacgctgtcgaagccggcgccgatctccacgcccttgaccgcgttgatgcccatcatggcgtgggcgatgtcggcgtcgagcctgtcgaacagcggctcgcccaggcccaccggcacgttgctggccaccacctcgatgcgcgcgccgaccgagtcgccgtcgcggcgcagcgcgtccatataggtttcaagctcggggatgatgtcggcgttgggcgcgaagaacgggttctccggcacgtgcgaccagtccgtgaacggcaccgcgatctcgcccagctgcgacatatagccccggatctcggtgccatacttttcgcgcagccacttcttggccaccgccccggccgccaccaccggcgcggtcaggcgcgccgacgagcggccgccgccgcgatggtcgcggatgccgtacttctgccagtaggtgtagtcggcatggcccgggcggaaggtctcgacgatattgccgtagtccttgctgcgctggtcggtattgcggatcagcaggcagatcggggtgccggtggtcttgccctcgaacacgccggacaggatctcgacctggtcgggttcctggcgttgcgtgacgtggcgcgaggtgccgggccggcggcggtccaggtcgccctggatatcggcctcggtcagcgccatgcccggcgggcagccgtccaccaccgcgccgatggcgggcccgtgcgattcgccgaaggtggtaacagtgaaaagcaggccaagggtgttgccggacatgatggaaaccgcacaggaattggggaaggtttccattgtaaggccaatggcgggcctcgggcggcccggcaggctcaggcggcggcgctttccagcgccagttcggggtagaactcggcgcgcatccgctccatataggccaccaggttggcatgcccctcggccgcggtgcggatcggagtgtcgaatacggggcacagcaggctgccggcaaaggcaaacagcgtggcgtcggccccgcatggcacattgcccatcaggtagggcttgtcgcccaggatgtcggcgatcgaggtcacgcccttgctggccagcgccaccaggtcttcttcgctatgccggcccaggccctgcccccacagcgtcttgcgcaccttgtagcgcaccagccgctcggccaggccgcgcaccggcgccggcacgccgcggaagaactgggccggccccttgtcgaagttggcctggtccagccagcgcacccgcgccaccgcccaatacaggtggtcttccatcagcttctcggcggcccaggcgataccgcgctcggccgcgctcaggcccgcgtcgaagtcgatgtggtaggtcttctcgatatgccagcggatcaaggtggaatccgccacgatccggcccatgtcgtccaggtagggcagcttgcccttgggcgcgcgccgcaggctgccgcggcgcgcctggtaaggcaggccggccagcttgagcagcatctcggccttggtgacgaaggggctggcgtcgggcagcccgaaggcggggccaaaggtgtagagcgtgatcatcgtggattcgggttcggcacaaggcgttagcgccagtcgccgcgcagggcctgcaccatctgctgcagcccttcgggggtggcggcctcgggcggcaccggctcgcccaccaccagttccagccggttcaggatgccgcgccggaacggccgcgacatcgccggtgcccccttgcgcgaaaagaagctgccccacagcccgcgcagcgccatcggcaccaccggcaccggcgtgcgccggatgatctgctgcacgccctgcctgaacgggttgatctcgccggtggcggtgatcttgccttcggggaagatgcagaccagatccccctcgtccagcgcctgcgccacgctgtcataggcacgcctgagcatgtccggattctcgtgcgccggcgcgatcgggatagcgcgggcctggcggaagaaccacgacagcagcggcaccctgaagatgttgtggtccatcaggaagcgcaccgggcgtgggctgcaggccatcagcaccaccgcgtcggcaaagctgacgtggttgcagaccagcacggccgggccgtcggcgggaatgcgctcggcattgacgcggcgcagccggtagagggtatggaccaggatccacgcgataaagcgcagcaggaattccggcaccagcgagtagatgtagaccgccaccaccgcattgagcagccccaccaccaggaacagctgcgggatgctgtagcccgcctgcgtcatcgccacgcccagcagcgacgcggcgatcatgaagaagctgttcaggatgttgttggcggcgatgatgcgggcgcggtgcgtgggcgcgctgcggctctggatcagcgcgtacagcggcacgctgtagaagccgccgaacatggccagcaggaacaggtccgccagcacgcgccagtggcgcggctcggccaggaagccgccgatgctgctgagcgccacgggtgcctgcccctggctggcaaagtacaggtcgaccgcgaacaccgtcatgccgatcgagccgaacggcaccaggccgatctcgacatggcgcccggacaagcgctcgcacagcaatgaaccggtgccgatgcccagcgagaacaccgccagcagcagcgtcaccacgttctggtcgccgcccagcacatccttggcatagctgaagaacgaggtcaggaaggtggcgcccaggaaccacagccacgaaatgccgagcaggctcaggaataccgtgcggttgccacgcgccagcaccaggttgcgccaggtctcggaaaacgggttccagttgatgcgcaggtccggctgcggcgccggcgaaaccgggatgcggcccgacaccagccgccccgccacggcgatcaccacgcacaccgcgcccacgtacatcggccccacgatggttccgccctgctgcagcccggccagttcgccgccgatcagcgtcccgatcaggatcgcgacaaaggtgcccatctccaccatgccgttgccgccgaccagttcgctttcatccaggtgctgcggcaggtaggcaaacttgaccggcccgaacagcgtggaatgcagccccatcaggaaggtgccggcgtacagcagcggcgcgctgtgccaggcaaagccggccaggcccagcaccatgatggcgatttccagcgacttgaccagccggatcaggcgcgacttctccagcttgtcggcgatctgcccgctggtggcggagaacagcacgaacggcgcgataaagatggccgagatcaggaaggccgcgctgcgcgcgtccacgccctcgaacagcgccgtgtggtaggtcaccagcgaggtgaaggcgaccttgaagacgttgtcgttcatcgcccccaggaactgggtccagaagaacggggcgaagcggcgcaggccgagcagtcggaactggctgggttggctcatggatgggccggtcggtcggcggaccgccgcggaagtgggaacgccggcaagtttgccggagccggcgcccggccgccaccccgccacggccgcgcggcgccaaccgagggtatttccgaaggaagcttcagtccgggcggcccggcgccatcactcggcgcgctcttccggccagtcgcggatataggccttgagcatcttgttctcgaagctctggtcctcgaccacggccttggcgacgtcgtagaaggagatcacgcccatcagcgtgcggttgtcgagcaccggcaggtagcgggtgtgacgctccagcatcatgcggcggacctcgttgacgtcggtctccatggtgcaggtcagcggcgcatcgtccatcaccttgcggatgctggtgccaccgacgttgccatgattgcgggcgagtgtctcgatgatctcgcggaaggtcagcatgccgaccaggtcgccgtattccatcaccaccagcgagccgatatcgtgctcggccatggtgtggacggctaccagcaaggaggtgtcaggcgtcacggtatagagcgtattgcccttgatctggaggatgtcgctgactttcatgttggtctccgctgcctgcgctcaaactgggggcatcgctccggcggggggcacaggaggcgataccggtcacattgttatctgtctacgggtgtgcgggcgcgcgctgcatcacggcgccccgttggccgatcctagcccaaacccgccgtcaaagtaaagcaggaggccggtttgcgggcgtcggcgcgcgcacggtgctacgatgctggccggagacaactcaaggccgaccgaccatgtccggaacccgattcgacacgctggcgctgcacgccggcgccgcgccagaccccgccaccggggcccgcgccacccccatccacctgaccacgtccttcgtgttccgcgacagcgagcacgccgcgtcgctgttcaacatggagcgcgcggggcacgtctattcccgtatttccaaccccaccgtggccgtgctggaagagcgcatcgccgcgctggagaacggcgccggcgccgtcgccacggcctcgggccaggccgcgctgcacctggcggtggccacgctgatgggcgcgggctcgcacgtggtggcctcgtcggcgctgtacggcggctcgcacaacctgctgcactacacgctgcgccgcttcggcatcgagaccaccttcgtcaaggcgcgcgacatcgacgcctggcgcgccgcgatccggcccaatacccggctgctgttcggcgagaccctgggcaacccggggctggacgtgctggacatcccgacgctggcgcaactgggccaggataacggcatcccgttgctggtggattccaccttcaccacgccctacctgctgcgcccgttcgatcacggcgccggcctgctctaccactcggccaccaagttcctgggcggccacggcaccaccatcggcggcgtgctggtcgaaggcggcactttcgacttcgaggcctccgggcgcttcccggagctgtccgagccgtacgagggcttccacaacatggtgttcaccgaggaaagcacggtggcgcccttcctgctgcgcgcgcgccgcgagggcctgcgcgacttcggcgcctgcatgaacccgatggccgcctggcaactgctgcagggcgttgagacgctgccgctgcgcatgagccgccatgtcgacaacacccgcaaggtggtgcagttcctggtctcgcacccgatggtggagtcggtgtcctacccggaactggaatcgcaccccgactacgaactggccaggcgcctgctgccgcgcggctgcggcgcggtgttcagcttcaacctgaagggcaaccgcgtggccggccagcgcttcatcgagagcatgtcgctgttctcgcacctggccaatgtgggcgacgcgcgctcgctggtgatccacccggcctcgaccacgcacttccgcatggacgcggcggcgctgcagtcggcaggcatcaccgagggcacgatccggctctcgatcgggctggaagacccggatgacctgatcgacgatctcaagcgcggcctgaaggcggccgagaaagccatgagcggcaagggagggcaagcctgatggaactgaccattgccggccagccggcctacgcctataccggcggcaaacccttcgatcccgccctgccctgtgccgtgttcgtccacggcgcgcagaacgaccatagcgtgtgggctctgcagacgcgctggtttgccaaccacggcttctcggtgttggcggtggacctgccgggccacaaccgcagcaagggcgcgccgctcgccaccgtcgaggccatggccgactgggtcatggcgctggtggccgccgccggcgtgaagacgccggccttcgtgttcggccacagcatgggctcgctgatcgcgctggaatgcgcggcgcggcatgcgcaggcggtgcgcggcatcggcctgctggcgacggcctacccgatgaaggtctcggacgcgctgctggacgcctcgctcaaccgcgagggcgaggccatcgccatggtcaatacctggtcgcattcgagcctggccaacaagccgtcttcgcccgggccgggcgcgtggatgcacggcggcagccagcggctgatggagcgcgtgtcgcgcaacaacccgcaggcccatgtgttccacaatgacttctcggcctgcaatgcctacgcccatggcgaagaggccgcggccgcagtggcctgcccggcgctcttcatcaccggcaccaaggacatgatgacgtcgcccaaggcggcccaggcgctggccggcaagatggccaaggcaagcctggtcacggtgccgtgcggccacgcgctgatgggcgaacgcccggatgaagtgctggacgcgctggcggcctttgcgcgcaaggtggtcgctgccggctaagcctggtcgcggatggctggccggccacgccggcggccagcctcccgacacctcggcgcagaaggtctacactgcacaaaacaagacctgccggagacagccatggcccacgcccgcgcgcgcgagttcgagaacttcgcggccttctatccctactacctgagcgaacaccagaaccgtacctgccggcgcctgcattttgccgggtcgacggtagcgttgctgtgcctggtggcgctggtggttaccggcaatgcatggtggctgctggccgccgtgctggcaggctacgcctttgcctgggtcgggcactttggtttcgagaagaaccggccggcgacgttccggcatccgctctacagcctgatgggagactgggtgatgtatgccgatatctggcggggcaggatcccgttctgagcaacttcactgtcgcagggggcggaccttacacctggccatgccagcccggcggcaccacttccagcgtgcgccgctgggggtggctccccccatccccttcagtcggcggcagatcagccggctgctgccggaacaccgcctccagcgtctgatccagctgcggattgtccaggaccgacttgagcgcatccgccccttgcagctgctgcgccagcgcggtgcgcggcagccgcggcaggttcagcaccagccggtcatgcagcgtgcgcaacgtcacctgtgacggattgcacagcagtgcccaatgggcctgaccacgctcctgctgcaagcgcccgaccagatgcatggccttgagcttgcccagcaggtccgacaggtaatcggcctcgacccgcagcttgcggcccaggtccagttcgccaacgctgcgcggcacctcgtcgcgcgcgcggtagagcagcagcagcacgcccagcgcatcgaagaactcgctgccggcaaaggtgcggcggcgccagtagccctgccggatcaccggcaggttggcggcaatggtcgcacccagcagcgtcaccagccagctcaggtagatccacagcaggaacagcggcaacgcggcgaaggtgccgtagaccgcggtataggccgggatctcggtgatgaaatagccgaagccgcgcttggcgaactcgaacgcgaccgccgccaccaggccggccacgatggcatcgcgccattcgacataggcattgggcaccgccgtgtacaggaaggcgaaggccagcgccgacagcagcaccggcgtcgcgcccaccagcagccccagccccaccggcatggtgccgacatagcccgccgagaccgagatcaggtaggagctgatcgacaggctcgcgccgatcagcaccggcccgaaggtcagcaccgcccagaacaccagcacccgctgcgccagcgggcggcgctgcttgacgcgccagatcgcgttgagcgcgtcttccacggtcagcatggtcagcaccgaggtgaccatcaacccgcccaggcccattgcggtcagcccgcgcgcgctcttggcgaacatgccgaggtagcgctggatcgattcactgacgttgccggggatcaggttctggaacaggaacgcctcgatggcgttgcggaagtcgcggaacaccgggaacgcggccagcagcgcgaacgccaccgtcaataccggcactactgccagcacggtggtgaaggtcaggctggccgagacctgtggcagccggtcttcgccggcgcggcgcagcgcataccgcgccagggcgcgtaccttctgcaggttccattcccggcgcaggcgggcaacgcggggtccgatcatgcgcaaacaacctcctggatctggttctgacggataaacaggcggcccgcggcaccgggggcgcaaagccgatgggagatggcgcggggggcgcatctataatacgcgcattgcttccggcacctttcgcgcaacaccaccccgccaccgccggccatcccgctccatgaccgacatcctcgtcctgtattacagccgccacggcagcacccgcaaactagccgaactgattgccaacggtatcgacagcgtccccggcgcccaggcccggctgcgcacggtgccgccggtttccaccgtgtgcgaggccaccgcgtccgatatcccggccgacggcccgccctatgccgagctgcgcgacctggaggagtgcgccggcctggccctgggcagccccacccgcttcggcaacatggccgcgccgatgaagtacttcctggacggcaccgtggcgcagtggctgtcgggcacgctgaccggcaagccggcctgcgtcttcaccgccaccggcagcctgcacggcgggcaggaaaccacgctgctgtcgatgatgctgccgctgctgcaccacggcatgctgatcctgggcctgccgtattccgagaagggcctgatgaccacggcctcgggcggcacaccctacggccccagccaccatgcccacggcgacaaccgcggcccggtcacggaagacgaatcgggactggccatcgccatgggccggcggctggctcagaccgcgctgcgcctggcgggaggcgcggcatgagccccatccccgagagcgaccaggcgctgcacagtccctggctgtaccggttcagcgtgggcagcctgctggcgctggtggtgctgtgcatcgcctgggaatggttcctggcgccgctgcgccctggcggatcgtggctgatcatcaagttcctgtcgctgctgctgccgctgcgcggcgtgctgacgcgcaaccgctacaccatgcagtggtcgtcgatgctgatcctgctgttcttcaccgagggcatcgtgcgcgccaccagcgaccgcgcgccctcgtccacgctggcgtgggtggaggtggcgctgacgctggtgttcttcaccagcaccatcctgtacctgcgcccctacaagcgccgcgcccgggcggccggcaagccggccgcgcccaagtcctgaccctcattccgccgtcgccatgacctcgcctcaagactccttcctcgcactgtgccgcgccgcgctgggtgcgcagcacgtgctgaccgatgcagccgacaaggcaccctacctgaccgactggcgcaagcgctatcgcggcgaagcgctggcggtgctgcgccccggcaccaccgaggaggtcgcggaggtggtccatgcctgccatgcgcacaagatcgcggtggtgccgcaaggcggcaacaccggcctgtgcggcggcgccacgccggtggccgggcaggaccaggtggtggtttcgctgcagcggctgcaccgcatccgccaggtcgatccgctcaacaacaccatcacggtcgaggccggcgtggtgctgcagcacctgcaagaggtggcgcgcgagcacggccggctgtttccgctgagcctggcggccgaaggcagctgcaccatcggcggcaacctgtcgaccaatgccggcggcaccgcggtgctgcgctacggcaacacgcgtgagctgtgcctgggcctggaagtggtgacgccgtcgggcgagatctggcacggcctgcgcgggctgcgcaaggacaacaccggctacgacctgcgcgacctctttgtcggcgcagaaggcacgctcggcatcatcaccgcggcggtgatgaagctgttcccgctgccacgcgcctcggtcaccgcgctggccgcggtgcagagcccgcgcgccgcgctggcgctgctggccatcgcacaatcgcatgcgggcgccatgctgaccgggttcgagctgatgtccgcgctcagcatgacgctggtgacgcggcacttcccgcagctgcgctatccgttcgcagacatccacccgcagctggtgctgctggaactgtccgacagcgaaagcgaagcccatgcgcgcggcatcttcgagaccatgatgtcggccgccttcgatgccggcgtggtcgccgacgcggtggtggcggaatcggtgcagcagtcgcgcgatttctggaacctgcgcgagcatatcccgctggcgcaggtggaagacggcaagaacatcaagcacgatatcgccgtgccggtgtcgcgcgtggcggacttcatcgagaccaccgacgcgctgctgcagaacgccttccccggcgcgcgcatggtgaccttcggccacctcggcgacggcaacctgcactacaacgtgtcgccgccggaaggcgtcgaccatgacgccttcctggcgcaccaggaccaggtcaaccgcatcgtgcacgacagcgtgcgctcgcataacggctcgatttccgccgagcacggactgggccaactcaagcgcgaggaaaaccggctctacaagagcgaagtcgaactggcgatgatgcgcgcgatcaagggcgcactcgatccgcaggggctgatgaatcccggcaaggtgatctgagcgcgccgcgccatcatcgcgccagtgcctcgcggatatatgccgccaccgcctccagcaactggtcgagatggccgcgcagcacggcgaagccgcggtgctgcgcgaaccttgcctcgtccatataaagcgcgcggttgatttcgatctgcaggctgtggcggccgtgcgccgggtccgcataggcacggatcagctccgcccccttgtacggccagttgatgcccacccggtagccgaagccgcgcaggcactgcgccaccagctcgataaacgcaggcgagcaggtggcgccgtcgccgttgctgatcacaaagtcagcccgctccacgccattgtccacgttcatcgcattgccgcgcgatttcatcgaatggcagtcgatatgccacaccgcgcccgagcgcgcatgatgctgcgccagcaggccggacagcgcggcgtgatagggatcgtagtaggtcttcagcaggtactccgccatgtccggcgacagcggcgcggcgtacaccggcacgcccggcagcgccagccggcgcagcacgcccatgccgcgcccggacttgtcgctgggctgcacggcataaggcatggcgccgtcgatcagcgcgggatcgatgtcatcgcgggcgcggttgacgtcgaccatccagcgcgggaagcgcgcgcacagcagcgtgccgcccaccatcggcgcatgcgcgaacaactggtcgacataagcgtcccagcccgtcagcagggcttcggggggcgccgccagcggcagggtctcggcatgcaccagcccgctgtgcggggagtccaccaccagcggcagcgccgcgccggccggttcagtcagcgaataaggaagggccattatcagaatttgtgctggatgccgatgccgaccgtggtcacggtgtcaccgggcttgtgcgagttgggatcctcgcgatcgaagaagacgtagggcatggtgcgtttgctcaggctgtagccatagccggcctgcaccttcttgagcctgccttgcgggtcgcgctgtactgcgcgctccatgtagttcacggtgagcttgtgggcgccatagggcacggtgaagccgaccagccagtaaggcacgtcggtgcgggtggcggcagtgccggcgtagcggtcgcgcccgtagatgccgtagatattgaccacggtaaagttatacgacgccgcgccctgcaccttgtcgcggaaatcattggccaccagcccgccggccttggcatcgcgcgaatagcccacgcccgcggcaaagttgccggcagcgtagttaaggccaaggtcgtactggcggaagtcgtcctcggcccgcaccggcgacctggcgttgggagtggccggatcggggcccgccaggttcacgcgcgcccgtactgaaaagccgccgaactccggcgtcgcgtagcccagcgcgttcgacacgcggttgcgcgcgttcagcaccttggtgccgatggcagtggcgcccgcatcatggatggcgaagtcgatgttctgcgtcacctgcgagtagatcggcgaacccacgatcgtcaccgaatccagccgccccagcgcgatcgcgccgaagccgccctgcagtccgacaaaggcattgcggaactgcgggttggtggccgtgccgctgtcggcggcaaagccctgctccagcccgaacgcggcgcgcaagcccccgcccaggtcttcgctgccgcgcatgccccagcgcgaggcgttgtcgaccatctgcgtggcgcggccgtccgggcccttctggtattcgatatcggtgtcgaggcggccgtacagcgtcaccgatgcgtcggccgcggccgacagcagcgccagcgcgccgccgatgcaggcgcgtgcgagcgcactcttggtctggatacccttcatgcttctgctccctctattgttgtgtgccaacgcacaagtgcccctagggtgatcccaactgccgcgttgtctgtccgcgcagcgcgcacgctccccgcccgccgcgcgcgcggcgggatggcatcgatgcacaggggggagcgtgggccggccgggcggcagctatctagtcattcaagtggcaggcggacagccgcccaccgatatcgcgcagcaccggtacttcggccgcgcaacgcgcgctcgcatgcgggcagcgcggatggaaggcgcagcccgtgggcggcgccagcgggctgggcagttcgccgcggatcggctggtgcgctggcgggctggcgcccaggcgcggcgcgtcggccagcagggcacgggtatagggatggttgggcgcgccgaacacgtcgcgcgcagcgccgctctcgacgatgcggcccaggtacatgatcaccacgcggtccgacatatgctccaccaccgccaggttgtggctgatgaagacataggtcagttcgtgttcgcgccgcagctgcatgaacaggttgatgatctgcgcctgcaccgagacgtcgagcgcggacacggcctcgtcgcagatcagcaggcgcgggcgcagcgccagtgcgcgggcaatggccacgcgctggcgctggccgccggagaactcatgcggaaagcgctcggcgtagctgggatcaagccccacctgctgcagcagttcgccggcgaacgacgccgcgcgcgcacgcttgaccatgccgtgatagaccgcgccttcggtaatggcctggccgatgcgcagccgcgggttgagcgaggcataggggttctggaacaccatctgcacggcgcggtgatagccggcggacgcgatatcggcgcgcctgccttcccacgcaatctcgccgcccgtctgcggcagcagccccgccagcatgcggcccagcgtggacttgccgcagccggactcgccgaccacacccagcacctcgcccttcttcacctgcagcgagacatcattgacggcatgcaccgcctgcactggcttgccggccatgcgtcccagcaggccgggcctcatggagaagcgtttctgcaggttgcgcgcttcgagcatgactgtcatgccacctccaggggataaaagcagcgcagcgtccggccgcgcacggtggtttcggcgggcgcctggcggcatgcgtcctgcgcgcgctggcagcgcggcgcaaaagcacagcccggtggcagcgcggccagcgccggggccgcgcccgggatcgcgcgcagcgttgcgccgcgcatggccggcgtgggcagggaatccagcaacccgcgcgtgtacggatgcagcggccgctcaatcaggtcggcgaccgggccctgctccaccaccctgcccgcgtacatcacgcagacgcggtcgaccaggtccttgaccacggccaggtcatggctgatccagatcgcggcggcaccggtctcgcgcaccagctgcttcatctcgtagaggatctgcgcctggatggtgacgtccagtgcggtggtgggctcatcggcaatgatcaggtccgggcggttgatcagcgcattggcgattgccacgcgctggcgcatgcctcccgacagctcatgcggataggcgcgcatgcgctgctccggcgccgggatgcccacgcgcgtgagcgcgtcgactgcctgcgcgtgcgcttgcgcgcgggtgcggcggcgatgcaccagcacggtctcggccagctggtcgcccacgcgcatcaccgggttgagcgacatcatcggatcctggaacaccatcgcgatgcggtcgccgcgcagcgcctgccactggcgcggcgaacacgccagcagctcccgtcccttgaagcgcaccgaaccgccagtgacacgcccgggcgggtccagcaggttcatcagcgaaaacgccgtcaccgacttgcccgagcctgactcgccgacgatgccgaggatctcgcccggctccagcgcaaacgacacgccatccaccgccttcacggccccgcgcgcgagcgcgaagctggtgctcaggccggtaacttccagtagtgccatgccgggctccttacccttccagccgcggattgagcacgcggcgcaggcggtcgcccaccaggttgatcgagccgatcagcagcaccagggccacgcccgggaagatgctgatccagtacttgttcgacagcatgtattcgaagccattggcgatcagcatgcccagcgacggctgcgtgcgtggcagcccgatgccgaggaagctcatggtggcctccagcgtgatcgcatgcgcgatctgcagcgttccggtcaccaccagcggcgccatgcagttgggcaggatatggcggaacatcacgcgcagcgccggcaagccctggccaagcgcggcctcgacatattccttgcgccgctccacctgagccgcgccgcgcacggtgcgggcaaagtaggcccactgcacgatcaccagcgccagaagggtcttgtccacgccctgccccagcaccgccagcaggatcagcgccaccaacaccgcgggcaggctcagctgcaggtcgaccacgcgcatgatggcggcatccgccaccccgccgaagtacgccgcggccaggcccacggcgctgccgaccatcagcgccaccaccgcgctgatcacgcccacgcccacgctgatacggatgccatagaagatggcgctgagcaggtcgcgcccggcgccgtcggtgcccagccagtaatgcggccggccttcgtagccgacactgcccggcggcagttcggagtcgatcaccgacaccgtggcgaggtcatagggattctgcgggctgatcacatgggccagcacggcaaccagcagcagcgccaccagcagtgccagcgcggcggcggagacgcggttggcgcagaagcgccgcagcagcgagggccgtgccgcaggcggcgcggcggcaggcgccggttccgccgcggccggcgcaagcgcgggcacggcagtgtcggcttcagatacaggcagggacatcggttcagtctcgttcttttggagggagaaaagcggcggaggcggggtctaggccggcttgtgccgcaggcgcgggtccagcaccacgtagagcaggtcgaccaccaggttcagcaccacgaacagcaccagcgtgaccagcaggtaggccaccaccaccggacggtccagcgccagcaccgaatcgatgatcagcttgcccatgccaggccaggagaacaccgactcggtcaccaccgagaacgcgatcaggtggccgaactccaggccgaccacggtgacgatcgggatcagcacattgggaacgacatggcgcagcaccagccgcgcgccgcccacgcccttggcgcgggcaaacctgatgtactcctgaccggccacttcgcgcgtgccggcctcggtgaggcgcgcgaccagcgagatcttgaacagcgacagcgtcagcgccggcagcagcaggaagcgcatgccttcccaactggtcaccgacagcggcatgcccagcaccgtgctgaccggcccgcgcccgcccgaaggcagccagcccaggttcaccgagaacaccaggatgcagatcatgccgatccagaaggtcggcatgatcacgccgccgagcgagcacgccatcagcatccgcgccagccggctatgcggcttgaggcccgcaaacacacccatcgggatgccgatgcccagcgacagcagcagcgccgtcacggccagttccagcgtggccggcacgcggctgacgatcagctcgatcgccggccggttatagatgaaggaatcgcccaggtcgccgtgcagggcgccctgcaggaagcgcaggtattgctgcggcatgggcaggtccaggccgagcgcgtggcgcgcctcagtgatttcctgctcggtggcggtggggctgaccagcaggtgcaccgggtcgccgatcaggttgaccgcgcagaaggtcagcaccgacatgatccacagcaccgcaaggctctgcagcagccgtttgagaagggtttcgaacatgatgattaaaggcgggatagtccgtggcgcggatcagcgttgcggggcggcgggcggcgccgggcggatattgctggcataggtgaagccgtcgctgcgcggctgcaccgcgagcccgtcgcgataggcccacgcggcgcgcaggtgatgcagcggcacgatgcccgcgtcggcggccagcttctcggccgcgcgctgctgcgcctggtcgcgcggcgccggcgccatggtatgcatcgattcctcgatcagcgcatccactgccgcgttggcatagccgctgcggttgttggcgcccagcccggcggccttgtcctgcgcatgcgccaccgccaccagcggctccagcgaatcgccgctgaccgcgccgatgccgagcaggaagacgctgaattccggcttgccgccgtcgccgcccgaggtggcgcgggtgatatagaccgaatacggcagcgtgcgcacctcggtgcggatgccggcgcgggtcagcatctgccccaccgcctcgcaggtcttggcgtcgttcagatagcggtcgttggggcaatgcagcgtcaggcggaagccctcgggatagccagcctcggccagcaggcggcgcacccgcgcggcatcggcacgcggcgccggcacgttgggggcaaagccgaagaaaccctgcggcaccatctgcccggccggcacggaatcgcccctggtcacgcgcgccgcgatcaggtcgcggtcgatggccaggctgatggcctggcgcacccgggcatcgcgcaacggattggccgccagcggctggccggcgttgtcctgcacataaggcgacaccgcgcgcgcctggtccagctgcaggtagttcagcatgtacgaggtcgccgatacggtgcggatgcggccgttggtgcgcgcaaaggcttcggcgatgctggccgacgaggcgtcgatcacatccaccagccccgacagcagcgccgaggcccgcgccggctccttcgggatgaactggaacaccacccgctgccacggctgcggtccgccccagtagcccggattgcgcgccagcgtcagctgctggccgtgctcccaggccaccagcttgtatgggccggtgccgatgctggcgctgccatgggcaaagtcggcctcgcgcacggccttgccgagcgagcgcggcagcatcgccaccatgccgatgttctgcggcagcaccgggttgggcgagcgcgtgcgcacgcgcagcgtcagcggccccgtcacctctaccgctgcaaccgacttcaggtaagtgcggaaggtgcgcgcccccggcagcttcatggcgcgctcgatcgaatagcgtgcatcctcggcggtgaatggctcaccgttgctgaaacgcacgcccgggcgcagctggaattcccagttgcggtcgtccagctggcgccatgccgtggccagctggggcacggggcgcagcgcattgtccaggccgaccagggtctcgtacacgtggccccacaggttgcggccggcggcgtccagcacatggggatcggcggcgctgatctcggccttgtagccgatgcgcaggtcggcggcatgcgcggcgtggccggccgcgagcagcgcgaaggcagccagggcagcggcgatacgtgacgccaggtggacagcaaggtgagacatggggatctggttcgtttctcgaaacaatgtttcattcagtgataccgcgtatcgaagaataagacatcgaagccgttgtcgagaagcagggtttacccctgtgattcgcgcggccaaagaaaaagcggcgccgaagcgccgcttttgagatatcgggaatttgcgcggtcctgccgcgcccagccgggttcagccgccggtatgcccgagcgcgcgtgacagcgcggcggcctccgccaccaccatcgccacatgccggtccagcgcctcctgcgtggtccggctggccgggctggcgatgctcagcgacgccactgccgcgccgctgtgatcgcgcagcggcgcggcggcagagacagcatcggcatcgcgctcgccaagcgacaccgcatagcccgcggcgcggatcgccgcaagctcgtcgcgcagggactgcggctcgatgatggtcttggcggtgaaacgttccagctggtgcgccagcacggcgtccagcacctcgggcgcagcgtaggcaagcagcagcttgccggaggcccccacatgcagcggccggcggttgccgatctcggtatgcacgcgcaccgattgggtcgactcatgccgcgccacacacaccgactccagcccgtcgcgcacgcgcacgatcacgttctcgccgcaggccgcgccgatcgccgccagccgcggcgccaccagcttgaccaggtcgaactgctcgcgcgcggcattgcccaccagcagcgcgttgtagctgagcttgtagaccgctgccggcgactcgcgcgcgatcaggccgcggtgctccagcgtggtcagcaggcggaacgcgcgcgccttggtcagcccggcccgccgcgccagttcggtcacgcccagcgatgggtgctcggccaccagcatcagcaagcccaaggcttcgtccaccgcttcaacgatgtaggtcatcgatccttcttcgccatgttcgtaaatgtcccatcgcggattgtagcggtcgccgcgagcattcggtatgcactgcgtcacacagacaggcgacgcagaagcgccccgaaggaagatgaatcaggcagagtctccggcgagggggcaccacctgcgaaccccacaatctggaattttcgaatgcaaagcccggcttatgatcggcagtactcgcagcacctcatgcacagattagagattgacgcagacaaccttgtacctgaccagagccctgcaccgctcgctgcagcaacagcccgaccaagtcgtcaccatcttccgcggccggcaccgcacttacgcgggccgggcttgccgatgacaacgtcttcgatgacggacggggtcttggcctcgtagaggacagcagccttcatccttgtctccttcgctgcgccgggatgcagccgttacagctgcacccggctgcgcttgagctggaacgccaccgtcacccggtccgccggatagatcgtgtcggtgatctcaaggatcctgccctgcgcgtccttgtaatggcggatcagccgcaggccggccgagcccggctcggcgcccaacaccgctgccagccgcgcatcgatcagcacgccgtgaatcacctgccggatctcggcaatggccacgccgcaatcgcgctcgatcagcgcgctgaccaatagcctggggttgttgcggatggtatccgccaggtgcgccagcgaggcgtcgatgtagatgtcggcgcgcgccaccggcgtgctgcccttgcgcgcatcgacccgcgtgccggaaaaacgcagccattcgctgccaatcggcgcctccagcaggcgggcctcggcgcggtccagcgtgacgctgtgcaccgcctcgatactgcggatctcggtggctgccacccgcaccaggtcttctgcggtgccgaacgactggatgtacgacgcgtccgggttggcgctctcgacgatggtccccaccgccttcttgcgcgagatatagccccagtcctgcagcagcttgagtgccgcgcgcacggtatggcggctgacgccatgctgctcggcgagatcatgctcggtcggcagcaggctgccgaccacgcggcggccctcgacgatatcccggaccagggtgctggccagctcggcatagcgggtcgaggcggtcgcccccggcgccgccggtgcttccgcacgcttgtcgttcagttggttgcgcatggcaatgagatgtcccgggccgatgcatgaaaaatggggccgcgcattctaagacaagcggcagcggcacccggagccgcgccgctcaggcctcgaagaagcgccggtccgcttcggccggcaccgtcatgctggcgcaagacctcgtctcccgccgtgactatgtccgtacatagtggagggcggaccaagctatgtcaatgatcggaatatccaggaaatcttggcggaaattcacccacccgatacgggtgggccggcgccttgacttgccaccgaaccgcgctgatctcttactatgtacgtacataaagccgcatgccggacgtcgcagggatcgaccaaatgagcgcaacgtgcaaaagctgaccgacgaacggccgggcgcgtgtgcaatgcgcagcaggtgatcgacgccatcgagtctttcagcagggtgcgcaccaaggaagagatcgcacagtgcctcggcggcagggtgccgttcggcccggaaacccctgcaatatccatgcgtagcaccatttgacgcaccagaggagaaaagatgagcatcaagggcaaggcctatatcgtcggggcctatgagcacccgacccgcaaggcaccggacaagtcggtggcgcagctgcacgctgaaagcgccaagggcgcgctgcaggacgctggcctgacgctggccgacgtggacggctacttctgcgccggcgacgcgccggggctgggcgcggtcaacatggtcgactatctcggtctcaaggtgcgccatgtcgactccaccgacaccggcggctccgcctacctggtccatgtctcgcatgcggcgcaggccatcgcggccggcaagtgcaacgtggccctgatcacgctggcggggcgcccgcgctcggaaggctccagcggcacgcaggcgcgcaactggggcgccaacctgcccgacgcgccgttcgagagccccttcagcccggtcacagtcaacctgtacgcgatggcggccatgcgccatatgcacgagtacggtaccactgccgagcagttcgcctgggtcaaggtggccgcgtcgcaccacgcgcagcacaacccccatgccatgctgcgcgacgtggtcacggtcgaagacgtgctgaactcgccgatgatttccgatccgctgcacaagctcgactgctgcgtggtatcggacggcggcggcgcactgatcgtggcgcgcccggaaatcgccgccacgctgaaacggcccaaggtgaagatccgcggcgccggcgagtacatcaagggccagctcggtggcgaagtcgacctgagctggtccggcgcgcgcttctcgggcgcgacggcattttccgaggcgggcgtcacgccggccgacatcaagtacgcgtcgatctacgacagcttcaccatcaccgtgctgatgcagctggaagacctgggcttctgcaagaaaggcgaaggcggcaggttcgtcgccgacggcaacctgatctcgggcgtcggcaagctgcccttcaacaccgacggcggcggcctgtgcaacaaccacccggccaaccgcggcggcatcaccaaggtcatcgaggccgtgcgccagctgcgcggcgaagcccacccggcggtgcaggtcgccaactgcgacctggcgctggcgcaaggcaccggcggctacctgggctcgcgccacggcagcgccaccctgatccttgaacgtgaataatgcgcgggagcaatgacatgacgaccccacataccccctttgcctacaaggcaccggacgagcagcccgacaaccttcccttctggcaggccgcgcgcgaagggcaattgctggtcaaggtctgcgacgactgcggcaagcctcactggtatccgcgcgtgctgtgcccgttctgcatgggcaccacctcatggaagccagccagcggccgcggcaccatctacagcttcagcgtgacgcgccgcgccggccccaatccgttctgcatcgcctacgtgaagctggacgaaggcgtgaccatgatgacccatatcgtcgactgcgacctcgacacggtgcggatcggacagaaggtacaggtgaagttctcgcccagcgatggcggcgcaccggtaccgacgttcacgctggcctgaggccggctgctggatgggcgataccgcgctctgacggcaactgcaacatgacagtaaagacaaccatgacccacaactatctgcccgatgcaggcgtcaccgccgtccccgcgggtccgcttgcggtggacgccgcagtggcgctcggcgacgtgccgcgcgtcttccatatgccgcacaccaccctggcggagaaccttgagatctcggcccggcgcttccccgacaaggtcgcggtccagttctaccacggcgccaccacctatgccgaactgctggcgcaggtggagcgcatggccggctacctgcagcaggcatgcggcgtgcgccgcggcgaccgcgtggtgctgctcagccagaacagcccgcagttcatcgtggcctaccacgcgatcctgcgcgccgatgccgtggtggtgccggccaacgccatgctgctggaagacgagctgcgccatatcgtcaccgacagcggcgcggtggccgcgtttgccgcaagcgagctggtcggccaggtggcgccgctggtcggcaccacgccgctgcgccacgtgatcgtgcatcactatggcgatgccctgcccgcgcagcccgacgacggactctcgattccggactgggtgcagcagcgctcgtccggcacggcgttgccggccggcgcggtccactggcagcaggccatggccgccggctccacgccatcgccgcgctccgcaggcctggacgacctgtgcatgctgccctacacctcgggcaccaccggggcgcccaaggcctgcatgcacacgcaccgcacggtgatggtgtcggtggcgggctcgcagctgtggcggcgctcgcacgccgaatcgaccttcctggcagtggcgccgatgttccacctgctcgggctgcagaacggcgtcaacgcgccggtctacatgggcggcaccatcgtgctgctgccgcgctgggaccggcgcaccgtggcgcagctggtggcgcgccatcgcgtcacgttctgggctgcgccgccgccgatgctggtggagttcttcgcgcagccaggtatcgagtcattcgacctgagcagcctggcctgcgtggtcgggggcggcgcggcggtgcccgacagtaccgcgcggctgatgaaggagcgctacggactgcagtttgtcgaaggctacggcctgaccgagactgcctcgttcatcatcgccaacccgcttgccgcagcgcgctccgggcacctgggcgtgccgacctacggcgtcgatgcgcgcgtcatcgatcccgccacgctgaccgaagtgccgcgcggcgaggtcggcgagatcgtggtgcacggcgcgcaggtgatgctgggctactggaaccagcccgcggccaatgccgagagctttatcacgatcgacggcaagcgcttcttccgtaccggcgaccttgccagcgtcgatgccgacggctacttcgtcatgcgcgaccgcctcaagcgcatggtcaacgcctcgggctacaaggtgtggccggccgaggtggaagcgatcctgcatacccaccctgccatcctggaagcctgcgtgatcgccgcgcgcgatccgcaccggggcgagaccgtgaaggcggtgatcgtgcggcgtgacggcgccggcgtttccgaggaagagttgctggcgtggtgccgcaccagcatggcgacctacaaggcgccgcgcatcgtgcagtttgtcgaacgcctgccgcgctccgccaccggcaagatcgcgtggcgcgaactgcaggagcaggagatgcagggagctccgttgccgaaccacaaggcctagtgtcctgctccgcagacaaaacggcgcgccgagcttcgtcgaagtcgcgggcgtggtgcagccggcaccggcgccgcgattcctcggcacgccttccgagatctccggccccgcgccggcgcgcggcgagcatggcgccgccgcgctgcgcgactggggcttcgatgccgatggcgtggcacagctgcaggcacagggcctgggactgatggcagagcgctaaggcgcacacgcgcggcaggcgccgcgccgcacaactcaatgtccacctggccggcatcgtccggccgcgtgttttgctccggccccgagccggagcattcttttcatggctgccccgctgcgtggcaccgccacccagggcaatcccgcccagccgatatggggggcatgcaaggtgccgggcatcctataacttcccacatgcagcccttcttgctgcgcagtctcctaccccccttcccgaggtatcacatcatgcgcatgaagtccctgatcgcgatggcagcgatggcgtggagcgccgcctgcggtgcccagagctacccgtcgcgtcccatcaccgttgttgtcccgggcccgcccggcggcgccaccgacaccgtggcgcgcgcactggccgaggacatgggcaagcgtctcgggcaaaccatcatcgtcgacaacaagcccggcggcgcgggcgtgatcgcggtgcaggccatcacgcgcagcgcgccggacggctacaccatcctgctcacccactcctcgccgctgatcaacacgccgcacctgtaccgcaacgtgccgtatgacgtgcgccgggacctggcctttgtcaccgaactctgcatcgccaagatcgtgctggccgtgaaccgggacgtgccggtaaagaacgtgcagcagttcctcgactgggccgcgaagaacaagggcaaggtcagctacggctcctatggcgtcggcaccttcccgcaccttgtcggcgcgcacctgaaccaggtgcgcggcctggacatggcgcatgtggcctacaagggtgaagcgccaatggcgcaggacatgatcgccggcaatatcgcctgggcgatcggctcgatgagcacgctcggcccgcatatcaagagcggccggcttaccgccctcgccgtgatgggcgacaagcgcatcaaggagctgcccgacgtaccgaccatggccgaggccgggctgaaggagcaggaactgcgctcgcccgcctggcttggcctgttcgcgcgctccggcacgccggcggcggtgctgtcgcggctggaagcggaagcgcgggcgtcggtccagtcgccgaccatgcgcgcgcggctcgaggcactggccatggatccggtgggcaactcgccggcggagttccggcgcgaattcgacgcgaccgagcccgtggtcgcccagatgatcaaggccagcggcgccaccgcggaataaggcaagcgcgcagccgggtggccagtgcggtcagcccggccgctgcaacgcgctgcgcggccaccaggatcgcatcgtagcggcgcgacacattgagcttggcgtagatctgccgcaggttccacttgacggtgtcgacgctcaggttgagcaccagcgcaatgcgcttgttcgacatcgactgctcaagcagcgcgaggatctcgcgctcgcgcccgcccccatcggcaacctcgtccggatcgggcggggttggctccaggaacaggccacgcgcgcaccactggccggcagatataaggcgacgccttgtgaccgggcacccggcaaaccctcccccacctgttgctgatggcctgcgggtgctgcgcgcgtctcacccgggccacgcggacagccggccaggcgtggcttggccgccgcgccgcgtctgccagtacaatcgcgacaacgtgccgcctttgcccggcatcgcgctgccccacccgcatttcctccgcatctcacctgcaccgtcctgcctcgcccatgccccagacgccagccaatccgccagccgccccccgcagccagcccgccgcgccagtctcgcagccgtcccggccggcgtcgctgcgcagcgcggcgcgcgtggtcgcgcgcgagcgcctgctggtgcagttgaccgaggcacggcgccggcgctgcatcgtgctgcagggcccggccggctacggcaagaccgcgctgctgaccgcgtggcggctggacctgctcgcgctcggcttcgacatggccgcgctgacgctggagccggccgacaacgagcgccagcgctggctcgaccgcctgctcggctgcctgtccgaggtcagccccgcgctgacgcgcgaagccatggtcctggccgaccgcggcaccgacgacgaagccgtcgagcgcgccatcatcgcgctggtgcgcggcattgccgcccaccagcgcgacgtgaccctggtgctcgacgacgtgcaccacctgacggcgcgcgtgctggagccgctgcagtggctgctcgactatgccccggccaatttccatgtggtgctggcctcgcgcgtggcgctgccgctgtcgctcgggcgcctgcgcgaccagggcatgctgctggagctggaccagcgcgacctgcgcttcacgctggctgaatcgcagcatttcctgcgcgcccagctgggcgacatcagcccgcgcgatgcgcgcatgctgcacgagctgaccgacggctgggtggccggcctgcagctctttgccgcgcactggaagcgcaagaaggccaacgccagcggcctcacctttgccaccggcttcgtgcaggccagcgtgcaggatgccggcgccttcgcagaatatttcgaacgcgaggtgctgtcgcgcctggcgccggacgaagccgagctgctggtgcgcgccgccgcgtgcgaacgctttaccgcgtcgctgtgcgaggccctgggcgagcaggcgctgggcgaaggcgagatcctggcgctgctggcgcggctggaacaggagaacctcttcatcaccccggcgcagggccccgagcgcgaatcctggtaccggttgcatccgctgctgcgcgaaaccctggcccagcgcttccgctcgcgcagcgatgcccagcagcgcgccgtgcacgcggcggcctggcgctggttccgcgaccatcgcatgctggaagaggccgtgcgccatgcggtgctggccggcgacgccgacaccgccgccgacctggtgcagcgctatgccgacaccctgatcattcgcggcgaggtgcgcaaggcgctcgggctgctgcgcgccatccccgcctaccaggtgcaggcgcgccccgaactgcgcctgctggcactgcgcacgcagatgttctcgcgcgagctggacgcgtgcgccgcggccgcggaccggctcgaggccgacatcccgccgggcgacgcctcgctgcgctaccggctcgcgctgctgcgcttttccctggtgctgctgcaagacgacagccagggcgcgctggcgctgctgccgcagatcgagaacgtgcccgccgacatgccggcgctgtttatcggctcgcgcaacaacctgctgtcgtggctctacatgcacctgggcgactacgagcgcgcccgccgcatccagaccgaggcagcgccgctggtgatcgacggcgtgccgctgctgggcaccgccagcggcatgctcaacgggcgctgcatgatcggcttcagccatgcgctggaaggcaacatgatccaggccgagcgcgtcgcccgcgacgtgctgcgcgaagtcgagcaagcgggccacggcggcgccgagccggagtactttgccgcggccctgctgggcgaggcgctgtacgagcagaacgacctggaggctgcacgccggctgctggaggaccgcgtcgacgtgctcgagcgggtctcgatcccggactcggtgctgcgggtgcacaccgtgctggcagccgcgcactggatctgtggccaccggctcgatgccttcgtgcaactggagcggctggaagactacggcacccaactgcgcctggaccggctggtcgcgcagagcctggccaaccagatccggctgcacctggccagcggcgacattgccgccgccgaggccgcgctggcgcgcctggatgccattgccgcacgccatcgcaacgcgccgcgcggctcgctggacgccatccacatggtgaccgagcgcgcccacctgctgctcagcctggcgcatgacgacatgcgcggggccgaggcccgcaccgcagcgctgatcgcgtactgcgaggcgcgcggctggcaacgccacgtggcgcagatgcacatgctggcggccgtggtggcatcgcgccgcggcgacgccgaggcggcacgcacgcatgtgctggaaggcttgcgccgcggccaccggctcgggctgatgcgcagcgtgatcgatgcctgccccggcgcgctcggccagatcgtgcgcgtggccgcggacaccacgctggacccggtgctggccttctatgtcgaacgcctgcaggccaccgtgccgccgcgcgccgcgcaagccggcgcggcgggcggcaccgccgcggctgccgcgcccgccggcagcccggcccgggccgacgcgcgcctcgaggaactgagcgaccgcgaagccgatgtcgtgcgcctgctcggccaggccctgcccaacaagaagattgcgcgcaccctgggcctgtcgccggagacggtgaaatggcacttgcgcaacatcttccgcaagctgggcgtgagcagccgcgacgaggccgtggcgcgcgtccgcgaccgcgagctggaccaggcgccgcctgacgcgccgcactgacggcgcaaccgccccctctccctcccccctccccaacgccgcgcaacccatgcgcggccgcccctttgctgtctccggccacctgacgcgggtggtgttcgcggccccctcctccccggtaccttagcgccataccaacggccgcattgctgggctgaggcaaccttccgcagaccgacatccggagtactcaatggaaatcaaccgcagcatctatcgtgacgaccacgagatgttccgcaccaccgtgcgccgcttcctcgaacgcgaatgcctgcccaggcaagccgaatgggacaaggccggcaaggtcgaccgcgagacctggctcaaggccggccgcgaaggcctgctgtgcgtgacgctgccgaccgagtacggcggcggcggcggcgacttcggccactccgccatctatgccgaagagtatgcccgcgccggcctgagcggggtcggcttcggcgtgcactccgacatcatcgcgccgtatatcgcccgcatcggcaacgaggaacagaagcagcgctggcttcccaaggtctgctccggcgaatacatcctcgccatcggcatgaccgagcccggcaccggcagcgacctcaaggcgatccgcaccactgccacccgcgatggcgacgagtacgtgatcaacggcagcaagaccttcatcagcaacggcctgaacgccgacctgatcatcatggtctgcaagaccgacccgaccgccggcgcgcgcggcgtcagcctgatcgtggtcgaagccgagcgcgagggcttccgccgcggccgcaagctggacaaggtcggccagcacgcgcaggacaccgccgagctgttcttcgacaacgtgcgcgtgccggtggccaacctgctgggcgaggaaggcaagggctttgcctacctgatggccgaactgccgcaggagcgcctgtcgatcgcggtcagcgccgccgccaagctggaggtctgcctggaacacacgctggcctacgtcaaggaccgcaaggccttcagccagaccgtctgggacttccagaacaccaagttcaagctggccgacatcaagacgcaggcgatctcggtgcggctgctggtcgaccactacctcggcgagcacatccgccgccgcctgacgctggaagaagcggccatcgccaagctccatgcgaccgaagttctgggcaccgcgctggaccagatggtgcagctgcacggcggctacggctacatgatggagtacccggtggcgcgcgcctttgccgacatgcgcgtgacccgcatctacggcggcaccagcgaagtgatgcgcgatctgatcgcgcgcaagctgtaagcactgaccccaagacaaacaatcatcggagcacacctatgactcgcaaggttttcgtcgccggcgccggcatgatcccgttcaagaagccgggcagcagcgacacctatgacgtgatgggcgcaaccgccgtgcgccaggcgctggaagacgccggccttggctatgaggacgtgcagcaggcctacgccggctacgtgtatggcgactcgacctgcggccagaaggcgctgtaccaggtcggcatgaccggcatccccgtcatcaacgtgaacaacaactgcgccaccggctcgtcggcgctgttcctggcgcgccaggcggtgcagagcggcgcggtggactgcgcgctcgcggtcggcttcgagttcatgcagcccggcgcgctgaagtcgcgctgggacgaccgcgccccggcgcttgagcgcgccatcggcctggtggacgaactggtcgaccgcaaggacctgcccaatgccatccgccagttctccggcgccggcaaggcccatatggaaaagtacggcaccaggctggaaaccttcgccaggatccgcgccaaggccagccgccacgccgccaacaacccgctggccgtattccgcaacgtgctgaccaccgaggacgtgctggccgcgccggcgctgtgggaaggcgtgctcacgcgcctgatggcctgcccgccaacctgcggcgccgctgccgccatcgtggtgtcggaggaattcgcgcgcaggaagggcctgaagaccgacgtgctgatcgccggccagtcgctgaccaccgaccgccccagcacctacgacgcacgcgacatgatccgcgtggtcggcttcggcatgacgcgcgaaggctcgcagcaggtgtatgagcaggccggcgtcggcccgcaggacctcgacgtgatcgagctgcacgactgcttcgcgcagaacgagctgctgacctatgaaggcctcggcctgtgcccggaaggcggcgccgagaagctggtcaacgacggcgacaacacctacggcggcaagtgggtggtcaacccgtcaggcggcctgctgtccaagggccatccgctgggcgccaccggcctggcgcaatgctacgagatggtccagcagctgcgcggcaccgccgaccagcgacaggtggaaggcgcacgcctggccctgacgcacaacctcggcctgggcggcgcctgcgtggtcacgctgtaccagaagcacgcctgagcacactgacacaggagtccatccatgatcgacaagaaacacatcggcaaggtggtggcggatttccgcgcctgcgcaccggccagccagctgcgcttcttcgccaaggccaccggccagaccgatccggtctatctcgacgaagccgccgcgcgcgacgccggccacccgggcctgccgttgccgccgaccttcctcttttcgctggaactggccgggccggcgaccggctggcgagatgagctgggcatccgcatcgaccgcatcctgcacggcgagcaatcctttgcctaccaccgcatggcctacgccggcgacaccctgcacttcaagtccaccatcgccgacatctacgacaagaagggcggcgcgctggaattcgtagtgcgcgagacgcgcgtgaccaaccaggatggcgagcacgtggcagacctgcgcagcgtgctggtgcatcgcacttgaaccggagaacccgcatgagcaaactaggcttcgaccaggtcaaggtaggcgacaccctgccgccgctgacgctggagccggtcaaccgcaccacgctggcgctgttcgccggcgcgtcgaacgaccacaacccgatccacatcgacatcgatttcgcacgcaaggccggcaaccccgacgtgtttgcccacggcatgctggcgatggcctggctgggccgcttgctgacgcagtgggtggaccagcgccagctgcgccagttcggcgtgcgctttgtcggcatcacccacctgggccatcgcatcacctgcaccggccgcgtggtggagaagctggaagtcgacggcgagaagcgcgtcaggctggaaatccagaccgccaaccagtatggcgaaagcaagatcctcggcgacgccgtcgttgccctgtaaatccaatcaagcacaaggagtctgaaatgggagcacttgaaggcaaggtggcactggtcaccggttcgggccgcggcatcggcaacgccatcgccatgcggctggcacgcgaaggcgcgcgcctggtcatcaatgacctggacgccgagccggcgcaacagaccgtcgaggaactgaaggcaatgggcgtcgaagccgtggcctgcgtgggcaacgtgtccgcaccggactttgccgaccgcttcatcaacacggcgatgagcaatttcaagagcatcgacatcatcgtcaacaacgccggcttcacctgggacgacgtggtgcagaagatgagcgacgagcagtggtacgccatcctggactgccacatgaccgcgccgttccgcatcctgcgcgccgcctacccgcacatcaaggcactggccgccgccgacaaggaagccggccgcgaggtgtaccgcaagatcgtcaatatctcgtcgacctcgggcctgaacggcaatgccggccagatcaactactccggcgccaaggccggcgtgatcggcatgacccgcgccatggcgcgcgagtggggccgcttcaacgtcaacgtgaatgcggtggcgtttgggctgatccacacccgcatgacctcggccgacgccaaggccggcgccacggtcaacatcgaaggccgtgaaatccgcgtcgggctgaatccggagatgctgaagtcgcacgcccagcgcaatccgcttggccgcgggggcaccccggaagaagccgcgggcggcgtgtacctgttctgctcgccggattccaactacatcaccggccaggtgatcgcggtcgccggcaacgtgcagtaaatccagccgcaccgaagcgggggctcgcgttggcgagcccccgttgctgcagcaggcgcctaccggccgcccgccgcgatgctgccgaaatgaccgctgctgaagtcgcggaaggcatcggcaatctgctcttcagtgttcatcacgaacgggccatggccgacgatcggctcgtcgatcggctcgccgctgagcagcagcaccaccgcgtcggtgctggcttcgatgttcacatcctcgccggcaccgtccagcaccaccatctcggcatcccgcaccgtcgcctccgcgttgacggtgatcttgccgcgcagcaccaccagcgcggtatgccagccctccggcagcgccagccgcgcgctggcaccctggttcaggcgcatatcccacacatgcatcggcgtgaaggtgcgcgccgggccggccttgcccgcgtactcgccggcgatcacgcgcaccgtgccggcgccatcgggcatcggcaccaccgggatatcgcggtcgacgatggcctggtagccgggcgtggtcatcttgtcgcgcgccggcaggttgacccacagctgcaccatttccagcgcgccgccgctttgcgtaaaggccggcgagtggaattcctcatgcaggatgccggcgcccgccgtcatccactgcacgtcgccggggccgatcacgccgccctgcccggtcgagtcgcgatgcgcgacctcgcccttgtagacgatggtcacggtctcgaaaccgcggtgcggatgctggccaaccccgcgcgggcgctgcgtcggcgtgaagtcggccggcccggcatagtccaaaagcagaaacgggctcagttgcttgccgtggctcatgtacgaaaacatcgagcgcaccggaaagccatctccgacccagtgctgacgcggtgcgctgtagacgcccagaatgcgcttcatgtctgatctccgagtatgccgaccgatagcggcaggcaatgatccatggagcaatgataggagctgcagccggcgcgcggtagaccgtgggattgcaatgcagtgtcctgtggctggaacgatgcccggccgccgtccgtcagaagcggtagcgcacgtagcccatgctgaagttggtgccgggattgggctgcctgatgccggcattggacaggtgctggaagcggtagccgatggcaagccgctgcgccttgccgaaggcaatgcccacgccgaccatgtcagagaactggaacgccgagcccatgcgatggccgtcggcgatctcggtatggctgagcacgcgcaaacccacggaggcttcaacaaacggcgtcgcgtactcgcccgcatagctgaggcggaagatcggtgacacgccgaactccgtcagctggctcgacggccgggacgacagcgcccgccagtttgcgagattgacctcgccgtccagggacagcgcaaggcggcttgacagctgccactgcacgatatcgtcccagcgcgcggccacttcgtatttttcaacgccgtggcggttgtcgcggccatagccgccctgcatcgagaaggttgccgcgtcggcggcggccggaagcgcgcacaggcaggccgcaaacggaacggcggcagcaaggtgcgccagccggcttgatggggttgctatcttcactgacatccgtgggtttcgggcagcgtcgacgtgtatcgcggcgctgccactttgttttgatcacggcgctcgaagatagcagcccttcagatttgcggaagcctgcccgaagcaaacacagtgttccaatgccgaaacaatgcgacgtcacggccaaggaattggcaaagccacagacaattgtcgaaacttggtagtacgcggctgtcacggggccgcccacaagcgcaaggaggccatcatgcgcgcctgccgacaagcccgccctgccgccagggtcgccgcagtctggctgctggtggcggccatggccaccgcggcctggctgctgccgcgcatcgcgcagccgccgcaataccatcgttatgccgacccttacgtctgcttcggcacgccccactgcctcgacatcggctccaatctgctgttcctgctcgcgggcgcggcaggcctgcgctatctgggcaccacggctgccagccgtgcctttatcgcgccggctgaggcctggcctttccggctgcttttcctcgccgtcttcctggttggcctgggctccgcctattaccaccttgcgccggacaaccagcggctggtgtgggacagggccccgctggcgttcgcgctgatgtcctggctgggcgccaacctgtgcgagcgggtcagcctgaaggccggcttgcggctgctgccgctgctgctgatcgcagggccggccagcgtcgcctactgggcatggagcgaggcccgcggcatcggcgacctgcgcccttatctgctggttcaggcatcggccatgctggtggtgccgctgctgctctgcctctatgcgccgcgctacactggcgaccgggatgtgctggccatcaccggctgctatgtgctggccctggcttgcgatgtgctggatcaccagatcgccgcgctcacggggctggtcagcgggcacacactcaagcacgtgttcgcggcgctggccgtctatggcgtcttgcttcggctgaagcggcgccgcatcgtggaggaaggaacatgaccgtgccccaacctggtggccacgctcgcgagcccagcgagccctctgccctgggcgtcgacgtacggccgcgcgaagtgtgggcatgggccatgtacgactttgccaactctggctacaccaccgtggtcatcaccgcgctgttcaatgcctacttcgtcgccgtggtggccggcaatgcgtcctgggccacgctggcgtggaccgcggcgctttcgctctcctatgcgctggtggtgctaagcgcgccgctggtcggtgcctacgccgacctgcgcgcagccaagaagccactgcttgcggtgacgacggcgggttgcgtggtgttcaccgccctgctctattttgcgcagcccggcacccttggcctggccatcctgtgcgtggtcctgtccaacttctttttcggcagcggcgaaaacctgatcgcagccttcctgccgtcgctttccaccacccgggccctgggcagggtatcgggctggggctggagccttggctatatcggtggcctggccacgctgggcgcatgcctgctctatgtcaactgggccagcgcacgcggccacgtcgccagccagttcgttcccgtcaccatgctgatcacggcggccatctttgccctggcgagcctgccgaccttcctgctgctgcgcgaccgcggcgcgccacggatcgctgcgtccgcgccggctggcgaacaggcctgggccagggtatggcaacgcctgggccagctgcgccagttcagggacctgcgccgcttcctgctgtgcaccctgttctaccaggccggcatccaggcagtgatcacgctgaccgccatctacgccaaccaggccatgggcttcaccatgcagcagaccctgaccctggtgctggtggtcaacctgacggcggcggccggcgccttcctgttcggccctgtgcaggaccgcatcggccacgtgcgcgccattgccctgacgctgctgggctggatcctgaccatcctgctggcgcacgccgcgcgcgaagcgccgctgttctggcttgccgccaacgtggccggcctgtgcctgggcgccgcccagtccgcgggacgggccatggtggggctgctggccccgccctcgcgcgcggccgagttcttcggtctgtggggcctggcggtcaagctggcctcgatcgccgggccgctgacctatggcatggcaagctggctgacgggcggcgatcaccggcaggcgctgctggtcaccggcagctacttcgtggtcgggctgggcctgctgtgcggggtcaacaccatgcggggccggcgggctgccttgcgcgctgagcggatggtcgggctggagaccgggtacggagccgccactgccggccccgcttgccattagcagcacggacggcagactaaaatgaaactgccctttggcgattggatcgctctttcggcttccggacgctgaagctctggcgacagcccatgccagcaaacctcactccagagtacaagcaggccgaacaagcctatcggctggcacgccagccgcgcgagcagctcgaatgcctgaaggagatgctccgtgtcatcccgaagcacaaggggacggagcatctgcaggccgatatcaagtcgcgcatcagggagctcacgcaggcatctgcgggccacgggaaggccgctcacagagggccggcacatgcggtgcatgccgaaggcgcggcccagctctgtctgatcggcccgcccggcgcgggaaaatccagcctgcacgcaaggctgacaggatcgggcagcgaggtcggagcctccccccaccctacgcaggtgccggtccccgccatgttgccgttcgacgacattgctttccagctggtggacctgccacctgtatcggtcgaattcatgcaacccgggctcactgacatattgcgggcgacagacggcgtactgttggtggtcgacctgagcgcgccagactgtaccgaacagttggcgttgattctgcggcgcctcgccgaggcaaagatcatcctgtcggagcgctggccgggtcaggccgacagccctggggcgacggcggaaccggcggctgacccgttcagtgttcacctccctgcgctgctgctggccaacaagaccgatctcgccaacccggaagacgcggccgtgctcgaagacctgctcggtgtaagctttccggcgctcgcaacctcggccatcgacgggcgcggactggccgaggtcggtccgttccttttcagggctctgcgcatcgtgcgtgtctacaccaaggcacccgggaaacctgtcgaccagcgtcggccttttacgatgcgccgcggcgacaccgtgctggatgtcgccttgcaggtgcaccccgatctcgcgcgtacgttcaagttcgcccgcatctgggggagtggcaagttcagcggccagcaggtgggcgccgatcatccggtagccgatcgggacgtggtggaactgcattcgcaggcgcatggatgatcaaagccatcgtcgcagcaggcgagcgccgatgacatagactgaaagacctgcggccggttgttcccgcatgactgccgtgccggtttgcggggcaatttcttgcacggaggtatgccatgactacatacgtcatcctcagccgtctcgctcctgatgcgttcacggatcccaaggacatgaagcagctcgccgccacggtggccgagaaaatcaagtctgaatgccctgccgtcacctggaaggacagctatctgacactcgggcgctttgacgtcgtggacattgtcgagacggacgacctgaagcagctcgagcgggcggcgttgatcatccggggctatggacacgccgcgaccgagacgctgcaagcgacgccgtgggacgagttcatcgcggccctgtagcgcagatcgatggatcaggcggctcgcgcacagccagattcaggttgacctgatcgtcggctgccctatacttaaagtgctggctgagacacgctttagtaaagcgaaggtaggccagccaaacgatcatgcttcctggatgatctgccagatgaagcgtgatcgtgcaggccacatatgcctgcaggtccggaccggatcataagttgctgacccggttcggatgcacccagattgaagcgctgagcacctgtggaaggtgctctttttattggcggcatacggggcgacgttgaccactcgcctcgcgcgccgccattgagcgattcgggtaatgcaaaagtggacggatcggatcagagccgtacctgatccgaactgaaacaaggagtcgcatgcgcgcccgctcacgccctcccgacgccggctaccgctggctgtggcagctgtctgccgccggctggggtcactgcggcctggcctatgtcagcggcgcgctgctcgcaccgcgctggtggcctgcaagagaggccatgccactgcgcgaccggtattcttcgcggcgcacggcgctggtgctgtacaccttcgcctatcgtggcggtggagcacccgccggcaccatgccaccgcgcgatggctttacctggcggcaccagtgctggtcacaaggggttggggtggcctgatgccggaaacccgccacgcgcttgccgggcgccctgttctgcgccacagtggtcccaccgggcccaggctggagaccatgatgacaaaccggctcgccacagaaacctcgccttacctccggcaacacgcggagaatcctgtcgactggtatccctggtgcgaagaggcgtttcgccgcgcgcgcgacgatgacaagccggtcctgctttccgtcggctacgccacctgccattggtgccacgtcatggcgcacgaatcgttcgagaatccccggatcgccggcctgatgaacgatcggttcatcagcatcaaggtcgaccggcaggagcgtcccgatctcgacgacatctaccagaaagtcccccagatgatgggacagggcggcggctggccgctgacggtattcctgacgccgcaaggagagccattctacggcggcacctactttccgcccgatgaccgctatggccgccccgggctcgcgcgcgtgctgctgagcctgagcgaagcctggacgcatcgccgcgaggcactgcgcgacaccatcgagcagtttcagcaggggttccggcaactggacgatacggtcctgagccgtgaagacgcggaagaagccgcggaagtccaggatctgcccgcgcagacagccctcgccctcgcgcgcaatacggacccgacccatggcggcctgggcggagcgcccaagtttcccaacgcaagcgcgtacgacctcgtgctgcgcatctgtcagcgcacgcatgaacccgcgctgcttgatgcgctggagcgcacgctcgacggcatggcggccggcggcatccatgaccagctcggcggtggcttcgcccgctacagtgtcgacgaacgctgggccgtgccccacttcgaaaagatgctttacgacaacggccagctcgtcacgctctacgccaacgcctatcgcctgacgggaaagcaagcctggcgccgcgtattcgagggaacgatcgcgtacattgtgcgggacatgacgcaccccgacggcggcttctatgccggcgaagatgccgacagcgaaggcgaggaaggccgcttttatgtctggacagcgcccgaggtgaaggcagtcctgggcgaatccgagggagccctggcgtgtcgcgcctacggcgtgaccgaaggcgggaactttgaacccggcagatcggtgctccagcgtgccgtcacgctgactcccctggaggaggcacggctggaaggctggcgcgagcggctgttggctgcgcgcgcccagcgcgtgcgccccgggcgcgacgacaacattctcgccgggtggaacggtctcatgatccagggactctgcgccgcttaccaggcaacgggcaaccccgcacacctcgccgccgcaaggcgtgccgccagctttatccaggacaagctcaccatgccggacggcggtgtgtatcggtactggaaggacggcacagtcaaggtgccagggttcctggaagactatgccttcctggctaacgcgctgatcgacctctacgaatcctgcttcgacaggcgataccttgatcgcgcagccgaactcgtggcgctcatcatcgataacttctgggacgacgggctgtatttcacgcccaatgatggcgagccattgatacacaggcctcgcgcgccgcacgacggcgcctggccgtccggcatttcagccagcgtgttctccttcctgcgcttgcatgaactcagcggcgaggatcgctatcgtgacctcgccgagcacgaattccagcgctaccgggctgccgccagcgcggccccggccggcttcgtgcacttcctggccgccgcggacttcgcgcagcgcggcgcgttcgggatcattcttgccggcgacaaggcggcggccgccgccttggtggaaagcgttcaccgcacctatcttccggcacgcgtgctggcattcgccgaagacgttcccgtcggccaggggcggctcccggtggacggccggccggcagcctacgtgtgccgccatcgcgcctgtagcgcgcccgtgaccagcggcgaggcactgcttgaacgctgcgcgggggtgacggtgagccctcagtgaatctgcataccacgcatggcatgaatccgctcatgatgcctgctgctacaggcgttatctgcgagcgcaggaatttcgatcaggaccggcctgatgcgtccgactcgatacgcgatgtcgctgccagcctctccagtgcagcatcgatggcacccagggactcattcagacctgccgcatgcgcctcgtccctgagcagccgtaatcgggcaaaaaggggcggcgtggtcccggccccctgttcccgtccggcgcatatcaaggcgcggcccctgcggatcagaaagtctccccacggaaacggctcatgctgcatgtaatcctgcagcgctgccaggtagcgttcggcttcctgccaccggcgcgccgccagtgaaacgtcgatcgcagcttcgagcagatcgacgtggcaatggctcacgcagccctgggccagaatggcctcgccctggcgcagggcgtcgagctgcttgtccggatcgcgcgtagtgcgcgccaggaacgccagcacggttggccctgaataccgcacgccgctggcgtggctcagttgcagcgcctcgtcgagcacggactccgcctcctccacctggccgagcgcgccaatggcgaggccaagccgcgccagcacttccgcctcgaagcgccgggccccaagccggcgcgtcagcgccagtgccagccgcgcgtgcgcttcggcacccggccagtcgccggcgagctgtgcggtcgacgccatcacgtcgtaggccagcatctcgctgcgcgcatcgctgatccgccgcgccaggcgcagcccttcctcgcagctggcctgcgcggccgcaagttcgttgcggaacagttccaccgcgcccaccatcggcaggttggcacattcgatgcggatgaagccgtgcgcccgcgccagctcgacgcagcggacaaaatgcgcatgcgcggtcagcatgcggccttgctggtagtacgcatcaccgaggccgcccagcgcacgcgcctcgcccagcaccgatccggccgccctcgcatggctgagggcgcgctggtgggcggcgaggcactcttccatgtcgcccttcgggaaatagagattgccgcgcagcgattcgatctcggccagccgctcgggctggcccagcgcggcggcggcctgctccgcctcgcgcagcgccgccagggcttcgtcatagcggtcgagcaggcgcaaggcggccgccgtgccaagccacacccgggcccgctgtgccgcatcgctcgccagcaactgcgcttgccggaacgcctgcagcgattgcgtcggcaggcccaggtcaagtgccagctcgccgtgcaggcaggcaagcgtgtgcctgcaggcgtcgccgctatccaggcgctgcgcacgctcgaccaggcgcaatgcgcgctcgccgcggaagtgcgccgcctcatggcgcgccgcggcggcataggcctcgggcgcgccgggatcgcctgcggcatccaggtgctcggccgccagcgccggattccggccttcgtaccaggcagccgcgcgccggtgcagattctgtcgccgcgacttgagcagcgaggcgtacaccgcctcatggatcagcgcgtgcatgaacaaatagtcttcgccttccggccgggccatggcctcctgcaccaggcgctcgcaagcgtacgcggggtcctcgagcaaatgccgcagcgcggccgggccaaagcgctggcccagtacggcagcggcctgcagcgcctggcggtcggcggtagagaaccggtccatccgcgccagcacaatgctctgcagcgtgccgggcaactcgtccgcacccgcctccgcgccgcgcagcaactggtcgagaaacagcggattgccctcagcccggcgaatgcaggtagcggccactgcaggatcgacctggcgatggcaggctgccagttcgtgcgcctcggcatcgtcgagcggcccgaggtcgatggtggtcagcgatgctccctggctggtcgcccgccaggccgcatcgagcgggtcatgctcgggccgtacggtcagcaccaggatcagcgcatggctgcgggttgccgcggccagctgcgccaggcaatcgagcaccgtgcgctcggcccagtggacgtcttcgaccacgatcaactgcgtgcgcaccacgctgcggcgggtggccagcgtcaccatcaatcgctgtgcgccgcgttgccggctggcggcgtccatcgcggccagtgcagcggcctgctcctgggactggggctgctcgaacatgtcgcgggcgaacccaagctcatcctcgccgagttgccaggccgcgagcgcttgctcgatggccgcgcctgtcgctacttcggcggcggcgccatccgcgcccgtgcgaggcgcgacgcccagcagattgcgcgcgagcatgcgcaacggatcgccgccgctgccggcaccgaagtcgagcaccagcgcccggtgtgcctccaggccatgctcgcgcgccagcgcgacgaagcggtcggcgagccggcttttgccgatgccggcctcgccgcggatcagcacgacccggccatggccggaacgcaggcagctgtcggcaacgccggcgagctgggccagctccgcttgccgcccgacgaacgcgtgctgcgccggcgcctgttccaccccgagaaagcgccgcacgcgccagagcggaatcggttcggccacgccggggagcacggcgtgcgccacgcagtccgcttccaggcgtccgggcagcgcctggtagacccgattcgacaccatggttgcgccaggctcggcgcgctccatcgcctgcaaggccacgctaaccggcccgccggtcagcgtcatgccgctttcgcggcaggcggccagcacctggccgctggccaggcctacgcgcgccagcagcctggcgttggcggattccgccagccgcgccagaccggcatgcagcgccccggcggtatgcagggcgcgctcggcgtcgttcccatgcgccaccggaacgccaaacacgatggtcagccgggtgccgatttcatcggtgatatggccgccgcaggcgctggccaatgccctggcatgctggcgccagcgcgcaagggcatcgtgcaatggctcgggctccaggccagcgctgctatcgtccaggctggctaccaggaccactgcgtggcgcagttgcggctcggcagccatcacggcgcaagcaggtggcaccgcggcaccgtcgtcaccggccgcagccatgccagccaccggctcgcggcgggcccgcagcattgcctggtacagcgcctcggtctcgggctcaggcgataccccgagttcgcgttgcagtgccgcccggcacaagcggtattgcttgagcgccagcgcctgccggccctggcgctcatacagccggatcagcgtccggtgcacgtcttcctgcaacggatcgagggcaaggagccgggtggcagtggcgatggcccgctccgtctcgccagcctgctcgtggtgcgccagcaacctggccatgaccgccaacgccacgccgcgcagacgctcgcgttcgatcgccagccagtggtcgaacgccggcgcggcggcatgaaagccctccagcaagtcaccccggtacagcgccgcggcgcgctccagcgacgcgggcgtggcttcccgggcacactgctcgaactcgcacacgtcgaccccgatctcgcctagcgtcacgctgtcgccttctgccagcaccacgtgctggccagcttcttccagtgcgcgccgcgccgcgctgagtgcctggcgcaggctgctgcgcgcctgctcggtattgctttcggcccagcacagtgcggccagcttgtcgcgcggctgggcgcgcccttgcgccagcgcgagataggccagcacggcgcgcgccttgcgggcagaaagcgaaatcggcgttccgtctgcagaactcagctggaagccgccgaacaggtcaagacgggcacgggccatgatagggaaaccggaaaacccatcatttataggcgacggcacgggccaacgcgcgcctcgccagcgcaaagagatgaagccggtacttccttggcctgccgcaattttcacgcttctttcacgctggattgccgggcccgttcacggcggctccctagtatgacgacaaccccgggccgcgtggctccgacatagcggacgaacaggggctgccatcgaggcaagggctgcctcggtcacactggaaggattgcgtcatgacacatactgactcgcgcggtgtttcggtctcgagcaccaacaccaactcgctggagcgcttcgaagccgccctggaattgctgcatggctactatggcgacccgcttacggtgatcgaccatgccctggccgacgatccgggcttcgtgatgggccatgccatgcgcgcggggatgatgatcacggctggcgatggcaccgtggagccgatgctcaggcagagcgtcgaggcaggcgaagcgctgtccaccagcgccaacgagcgcgagcgccggcatatcgcggcggcacgcgcctggctggatggccacttcgcgcgctcgatccagctgtacggcgacatcgtggtcgactatccgcgcgacagcctggcgctgcagatcgcccatatcggggatttcctgctcgggcagtccaccctgctgcgcgaccgcatcgcccaggtgctgccccactggactacgcgcgtacccggcttcggctacgtcctgggcatgcatgcgttcggcctggaggaaacgaacttgtacgagcaagcggaggaacgcggccgcttcgccctggaactgaacccgcgcgatccctgggccattcatgcggtcgcccacgtgatggaaatgcagggccgccaggatgaaggcatcgactggctgagcgggcgcgccgccgactggtcgcaggacaatatgatggccgtgcacaactggtggcacctggcgctgttccatctcgaactcggccataccaggcaggtgctggacatctacgacgcgcatatccgcgagaaccactccgcggtggcgctggagctgatcgatgcctgcgccatgctgtggcgcctgcacctgcgcggcatcgacgtgggcgagcgctggaacgaagtcgccgacacctggcaggcacgcggcgccgaaggctactacgccttcaacgatacccatgccgccatgtcctatctctgcgccgggcgcgacagcgccctggccggcctgcttgccggcatgcgcgctgcggcaggtggcagtggctccaacgcgatgatcacccgcgaggtcggcctgccggtgaccgaggccctgctctccttctcgcggcaagactacgaccacgccatcgagctgctgctgccggtgcgccagatcgcgcatcggttcggcggcagccatgcccagcgcgatctcatcaacctgacgctgatcgaggcggcgttgcgaggccaacgcgccaacctggcctgcgcgctggcggccgagcgcatggaactcaagccgatgaaccccagcctgagcaagctggtgcagcgcgcttcagcgctccagcgcgaagcggcggacggccagggggaggcagtcgcggcgaaggtggcgtagcggaaacccgacaggtcgatatcgccgtcaaggtgcaggtcgccgtccggcgtggcgctgacgatctcgactccggggcgcagatgacgcccagctggccgcactcggtctgggtgaagcccgctaggcaagcgtgatcggcgcgtacttgagcggcacggtgtcgccggcattgcccaggcgcgtgacctcttcgttgtccttgaagtccacgcccaggctcagcgtatgccaccatgccccggtgtccggcacggtataggtgccgcgcaggccgacggcgtggcccttgcccagcacgctggtgccgttcaccgtggccacgttgctgtcggaaagatagcccgacgcctccacgctccagttgctgccgcggatcggcgccacataggagccggaccacacctgggtctggttcaaatcctgtggcgtgccgaagaagctcactgaggcgctatggcccagctgccagaggttgtcgtggcccagcgaggcgaaggcgcgcagctccttcgtatcggcgctgtagtcgttgttcaggccaacgctggcgcgccacggactgctgtcgtcgaccttcaggtcgacgaccatggtgcccggcatcgcgccctgccacaccagcgccaccacctggcgcttggcactacggttcaacgcagtcagctctgtctgcgcctgcgtgaaatcaggcaccacgccttccgccagcgccggcacctgctcgcgcacctcccgcggcgagttgtactcggcaccgaccacgcgcacgcggcccacgcggggtcatgcattggattgactcaagcttcttgttcgaatcgattgccgccgcgcccctgccgcaacgccctgaccaagggcacggcaggcgcgcatccgatcgcaggacatgatggcgtgccctcatgtcagcattgcgcacggtgcctagacggacggcactggcgccgcctgtcgtttgtcacaaaagattcatcgaggacgaaggagggaggcgtggggacagagtcaacggcaaatccctgcgcgaggatggtccccgcgagcgcagcctgctggctatactgcagcggcttcgccggcgtcctgcctggcggccaacgaaggaggtatcggatgcggacctggctgacgctatgcgccgttgcggcgcttggactggtcgacatggtacccgccgccgctgcgggacccgcgccctgcgtcgaggtcgaggtcaacggcgagcgcgcgccttcgttcccgtgcctgacgcagaagctgcaacctgccaacgcaggcaggccggcacggcctgacagcggactggcggccgaggcgatcgcgcagcggccctcgaaccagctcggcctttataacgaggcggccaccagccatcgcatgggcaacaccttcggcacgtcggtgtatccgcagcgcccggccagtccggcgccgggggcgccggtcattccgcgcgcgcagccttgactggtaggcggcaacggcggcgcagcgcgcctcagcggcccatgcgcgcgtcgtagctgcgcgagatgcgctccagcagacgcggatccgacgggtcggtgccgtcgaactgcacccgcaccgtgccgtcggcctggcggcgcacgctggccctcaccggcaggttgttgcgggttccttccaccgtgccggccacggcatcctcggtgctgatcgccacgccctggtcgcgcatggcgccggcggccgcggcaaaggcgcggtcgtaacggctgggctgcagccccgggtaggtggtcgggaccacctcggcagggtaagggtagggatagcatgccgtcagcaccggcattgcggcgaacacggcgacgcccgccaggagcccgagcccatgcttcatggcgtcaccttgctccagccagggccgggatcgaaggtcttggtcgccgcggccttgccggcgctgtcgggccccaggtcgcgctcatagacctggccatcgtggctgaccatgaagctcttcacgccggtatcgccataccgcaccggccaggccagcacggcgaagccgccgaacagcttgccattgacgacatagttgtacgcgccgccgggtgcgttggggccctgcgcggtcagcagcttgtagtgatagccgtagtagccgccctgcccgggattgcgctggccggccgtgaggaacgcggccccgagcgggctgggcggtgcgccatccgatgtcggccagtacagcccgtcctgcttgcccggcgtactcgcaagcttgcccgcgtaggccagcaggccgtcgccgtcatggtcggtccgggcgtattcgcgctgggcgtcatagaccgcgagcatggcctggatcaccgcgagttcattgcggccgatgcggcgtatgcgcatctcgtcgaccccggcacgcgtatcgaactgccagcccttcgatgtcttcaccagcggcactggcagggtccagccgtcattgcctacggcgatgcgggcatggctgtcgccctctggcttgaccgcatgcgagatccgccaggcctcgagaaagcggtatcggatgtcggcgccgactggcgggatcaggtcgtggaacctggcgcccagcagcaccttcatggcatcgtcgtcgctggtggcgaccgcctcgccaaaggcgttcatggcggcctcgggggttttgaagggcttctgcgcgtgcgcggcgtgcatgccggcaacggtcagcgcgagcgcaagcgccagcgcgcaggccaggcggccaggcagggatcgggcaaggcttagtggtgacgtcatgatcgaggctccctggtccgctagcgcctgccaccgcgtccgccaccgccacggcccccgccgccgaagccgccgccaccacggcccccgccgccgctgaagccgccgcctgcgcggcctccggccgactgcatgctggagcgtccgcgatcaaagtcgcgctgcgacgccgcgccgccgcccacgccctggaaggcgttgtcccgcccgccaccgccgccgcggtcggctacggtggtggcccgttcaccggcgccccgcgaccggtcggcggtccccgcgcggtccgatgcaccggcccggtcagatacgccgcctcgatcggaaactccggcccggtcagagaccccggcccgatcaccaccccgttcgccagcgcgatcaccgacccggtctcccgcccgatcacccgcccggtctccggcccgatccccggcacccggccgctcctgcccgcctgcccggtcgcgcaccgcgcggtcggacacgccggcaccgccctcgcgaccgcggaactcattgcgccggtccccgcctggcacatcgcgcgagaatttctcgcgggtggcgttgtcgcggtaggccacgccctggcggtgactggcgtcatgctgccagcgcccgcccgcctgtaccttggtgcggtcaaagttgcggtcgatattggtggcccggttgacattgatgttcacgtcgccgccgccccagttgcagttgccgaagatcgccccggcggcggccagcccgatgccccaggcaaagcccgtggccagcgcggcgcccgggtagtaggcgggataaggcggccagtagtacggcgggtaggacggataaccccaggagccgtagaccacggtggggttgtaggccgggacgtagatgacctgcgggtcggccggttcgatgcgcaccacggtctgcacgcctggcgccgccgtggtcgcgggctcgacaatgaccttctgctgttcggtggtcttgaggttgccggattgctgggccttgttgcgcagccgctggaccgcggccagcacgtctttctcctgggccaggaaggcatcgcccagcttctgcgtccagtcgagcttgtcgttcatcggctcaagcacctgcgggaaggccaccagcgacttcacgctgacatcccagggctggtcggccacggccttgaccgcggcgtcgcccttgaccttgggattggccttgacccagcgcgccgcgtgcacgatctccagcggataggtggaggccatcagcacctgcgacaacacggaatcgggatagagcgcgatcggcgcgaccagcgcctcaagctcctcgggcttgaaggtgggtggcgggttctgtaagtcttgggcagcggcgccgcccgctcccgccaccagcgcgacaaacagccatgcgcagccggacctgagcagccgcctgaccagaaaggccatgttccctcctcgcagccggtgacggagccatccgaggcgtactggggcagcgcgccgggctggaggatgttctcctgccgcgcgccattgccagccggcatacagagcggatattgctccatacgcgctacgaaggtagtacggaagacattgaaattcaaccgaattccggtcgccgcccggcaagggttgcgacaggaaaacggatcggcatgaggatttcccccgattttgttcctatcgtagaaacgagccgccagcgcgcatgcaagcggtacccccaggtttgaaggtgcatgaccggaccctcaaggcaccggtacgtcagtggaggaagatcatggccaagcgaaaagggaagcgccacggcggcaacgggagccaggcggagccgccgcgcgaaccaggcccggctgacagcctcgacgaaaagccggaccagcagcagcgcgagcgcatgtcggagaaggaataccagaaggcgctcttcacccttcatgtcgagctggtcaagctgcagcaatgggtgcaggccagcggcagcaaggtctgcgtggtgttcgaagggcgcgacggtgccggcaagggcggcgctatcaaggccatcacggaacgcgtcagcccgcgcattttccgcgtggtcgccctgcccgcgccgaccgaccgcgaaaagagccagatgtacgtgcagcgctacctgccgcacctgcccgccgcgggagagatcgtcatcttcgaccggagctggtacaaccgcgccggcgtcgaacgcgtgatgggattctgcaccgaagcgcaggccgacgagtttctgcgcgccgtcccgctggtcgaacgcgccatcgtgcattccggcatcatcctgatcaagtactggctcgaggtcagcccggaggagcagacccgccgcctgcagggacgcatcaaggacggccgcaaggtctggaagctcactgacatggacttgcgctcgtacagccgctggtacgactattcacgcgcgcgcgacgccatgtttgccgcatccgataccgactatgccccatggcatgtggccaattccaatgacaagcgccgggcgcgcctgaacatcatcacgcacctgctggcacagatcccgtaccaggcgatcgaacgcaagccggtcaagctgcctgccaggcagaaggcgggcggataccgggagcccgactatccctatcggtacgtcgaagaccggtactagctacttcggcagcttgcgcgacctccagttgccgtccttctccttgcagtaccacccggtccaggcttcggtttcgccggcccggcggaattcactgcgcagttgccggcagcggtcgccgtggtcgcgccgggactgcaatggcgtgaaggaaccttcgacctgccgctcgcgcgtgtcgggcggcagcctgaacgtcatgcgggcgccgtcggcgccctgctccagggtcctgcggaagacagccgtcaacgccgtgagctggtcctgggtaagcgtgccgacgatggtgccgcccaggtagtggtcaaaataggcaacggccggccccgccgacattgcacccgccagcattgcggcactgcatgccagcgcgtgcaggatcgtgtatcgcctgttcatcttgcctcctccgccatggcacgcccccaatcgggcaagcgcggaagcaccggacccacatgcccgccagccgcggcagcggcctattcgaagcgctcggtcagcaccatcgcgtccaccttgcgctgcttccagaacaggtggttgatgcgcggctgcagcagccgcagcgcggccccatcgaccgaattgaaatgcagcgacaccgccgggcgggtgccgtctcccggaacgcgctcgatctcatcgcaggccgggaagccgtaacgaccgatgaactcctggatttcctcgtcggttgtcgccgtatcgatattcacaagcatcagcacactcattgacgtctcctgaaggctcgggatgccagacagcccggttccgatgcggcccttgaatccgcgggcccatctccccttcctatctttaagccaggccggatcggaaggcaaactttgattcccgataaggagtccagggcagattccgccacctgcggcggcttcgatccggctggcgccggaccgtgcgccgacactagcgccctgccgcgcggtagcgcatcgcgaattgccaccccagttcggccagcggcgccgccttcctgcctgtctccacggcatccgccgcggcggcgttgccgctcctggctcgctgcccgatgccgtgcatgatcgccgcgagccggaagaagttgtaggcaagatagaagtcccagtgctcgagcgcgtgcgtgccgttggtctcgccgtaccagcgcaggtaggtcgcctcgtcgggaatgcccagcgcctgcaggtcgagcccgccgataccgcgccacaggtcggccgggatatgccagctcatgcagtggtaggccaggtccgccagcgggtggccgagcgtggacagctcccagtcgagcacgccgatgacgcggggctcggtgggatggaagacgaggttgtccatgcggtagtcgccatgcaccacgctggtctgctccgcgtccgggacatgctgcggcagccactctgccagcgccgccagcgccttgttgtcgcccatgccggtgtcgcggcactggccggcccagcgcgcgacctggcgcgccacgtagccgccgctcctgccatagtccgccaggccggcggcgcgatagtccacccggtgcaaggcgccgatcacgcggttcatctcgcggtagatcgcggcgcgctgttgcggggactggcccggcagggactggtcatagatcacgcggccctgcaggaatcccatcacgtagaaaggcgtgccaaggatcgtggtgtcttcgctgtacaggtagacccgcggcaccggcacgtcgctgtcgcgcagcgcgtgcatcacgcggtactcgcggtcgatggcatgggcagacgacagcaactggcccggcggcttggtgcgcagcacgtactgctgcgcgccgcaggccagccggtaggtcggattggactggccgccggcaaggcgctccagggtcagttcgggccggtcgatcaggccttctgcgtgcagcagcgtcgccagggcagcgctgtcgaaacccgaaccgccagtggcggcgggaactgcaagggctggttgcatcggatcgctctcctcgattgcgggtgggctcagagcgagctgaccgcgtggccgccgtccacgggcagcaccgtaccggtcatgtagtcggaagcatccgaggccagcagcagcagcgcgccgtcgagctggcggggctggccgagccggcgctgcggaatgcgcccgatcatggcccggccgctgtcggtcttgaagaagccgcggttgatgtcggtctcgaaatagcccggcgccagcgcgttgacgcggatcccgtgccgcgcccattccagcgccagcgagcgcgtcaggtggatcaggcccgccttcgcggcggtgtaggccgggacctgctgcgccacgcgcaggccgaggatcgacgcgatattgacgatgctgccgccgctgccggcctcgcgcatcatccgcgccgcgcactgcgccacgcgccaggcgccgttcaggttggtatcgatcacgccttgccaggcgtcctcatccacctccatggccggcccggtggtggcgatgccggcgctgttgaccaccacctggaccgggccgagctgttggcgcgccgtctcgaacgccgcgccgaccgatgcaggatccctaacgtcgagcgctacgacgcagccttgcccgccctgcttgcgcagttccgccagcacggcctcgccttcggccacgcgccggcccgccagcgccaccttgcagccggcgcgcgccagcgtctgcgcaaaatgcaggcccaggccgccaaaggccccggtcaccagcgctaccttgccctccaggtcggcaaacaggccgaggttgcgttcttgctggttcattgcttgtctcctctgcatcgggctcaggcggccttgagcatgtcctcgaccaccttcttggcgtcgccgaacaccatcatggtcttgtccatgtagaacagctcgttgtccagcccggcgtagccggcggccatggagcgcttgttgacgatgatggtcttggccttgtaggcctccaggatcggcatgccggcgatcggcgacttggggtcgttcttggccgccggattgaccacgtcgttggcgcccagcaccagcaccacgtcggcctggccgaactcgctgttgatgtcttccatctcgaagacctggtcgtacggcacctcggcctcggccagcagcacgttcatatggcccggcatacggcccgccaccgggtggattgcgtacttcacggtcacgcccttctccgtgagcgcttcggtcagttctttcagcgcgtgctgcgcgcgcgccaccgccaggccatagcccgggacgatgatgaccgtctcggcgttacccatcaggaaggcggcgtcgtccgccgagcccgatttcacgttgcgctgcgcctgccctgccgggccgcccgcggccgcggcgtcgctgccgaagccgcccaggatcacgttgaagaacgagcggttcatcgcccggcacatgatgtacgacaggatcgcaccggaggagcccaccagcgagccggcgatgatcagcatcgggttgttcagcgagaagccgatgcccgccgccgcccagcccgagtacgagttcagcatcgacaccaccaccggcatgtcggcgccgccgatcggaatgatgatcagcacgcccagcacgaaggcgatcgccagcatgaccaggaacggcatccatgcctgcgtcaggaagaacgcaatgccaaagcccaccatcgccaccgccagcagcaggttcagccagtgctggccggcgaacaccaccggtgcgccctggaacagccggaacttgtagcgcccggccagcttgccgaaggcgatcaccgagcccgagaaggtgatggcgccgacgaagcagccgatgaagagttcgatgcggttgcccagcggaatgtcatgcgaaccggcaaccgtgatgccgaaggcagcgggctccgccactgccgccaccgaaataaacacggcggccaggccgatcagcgagtgcatcgctgcgaccaactcgggcatcttggtcatctgcaccttcttcgccacataggcgccgatgccgccgcccactaccagcgccgccaggatcagcgccccgccggacagcagctcgctcttcagcttgaagatcagcgccaccgtggtgagcgccgccaccaacatgccggccatgccgaaggtattgccgcgccgcgccgtggtcgggtgtgacagccccttgagcgcctggataaagcaaacagacgcgcccaggtaggacagcgtcaccatattcatcgacaggccattcattgcgctacctccgccagtttgccgccaggctgccccttggcttcgggctgcgccttgggtgccttcttcctgaacatctccagcatgcgctgcgtgaccaggaagccgccgaacacattcaccgccgccagcgccaccgccagcgtccccattgagcggccaacgtagccctcggtcaggccggcggccagcatggcgccgacgatgatgatggccgagatcgcattggtcaccgccatcagcggcgtgtgcagcgcgggggttaccgtccagaccacgtggtagcccacgtagatcgccagtacaaagatgatcaggttgaacaccgtgtggctaaccatttccatcgagatctccttgattgccggttcagctggccagcgccagttcttcgcgccgcgtcatcaggcaggcggcgacgatgtcgtcttccaggttcagcgtgaactggccgttcttgtcgatgaccagcttgaggaagtccagcacgttgcgggcatagagcgccgaggcgtcggccgcgaccatgctggccaggttggtgtggccgatgatgatgacgccgttgtggttgaccacttcgtcggccaccgtcagcgggcagttgccgccctgtgccgcggccaggtctaccaccaccgagccgggtttcatctgcgccacggtggtttcctgcagcagcaccggcgccttgcggcccgggatcagtgcggtggtgatgacgatgtcggcctggacggcgcgctggtgcaccagctcggcctggcgcttcatccagtccggcggcatcgggcgtgcatagccgccgacgccctgggcgatctcgcgctcttcatcggtgaggaagggcacgtcgaggaacttggcgccgagcgattcgatctgctccttgaccgctgggcgcacatcggaggcctcgatcaccgcacccagccgcttggccgtggcgatggcctgcaggccggcgacgcctgcgcccaggatcagcacgcgcgcggccttgacggtgccggcggcggtcatcagcatcggcatgaagcgctggtagtggtgcgccgccaccagcacggccttgtagccggcgatgttggcctgcgacgacagcacgtccatgctctgcgcgcgcgtcgtgcgcggcgcggcttcaagcgcaaaggcggtgatgttcgcggcggacatgcgcgcgttgttctcggcgtcgaagggattgagcatgccgaccagcacggcgcccggcttcatctgcgccagctcggcttcgtccggtgcgcgcaccttcagcaccagttgcgcgcccagcgcctcggcggcgctgccgatgcgcgcgcccgcggcctcataggcgctgtcggtctggctggcacgcacgccggcgccagcctgcaatatgacctggtggccctgtgccacgtatttcttcacggtctccggcgttgcggcaacgcgcgcctcccccgcccgcgtctcagtcgggatccctatctgcatttcaatctcctttggtcccgtgcattccgtgcgtcgggggtggacgggcaacctgtgtgccgggcgccgcatgccggatcaacggcaaggcgcggcgccggtcttggcggtacagctcagcggggcacttccccttccagcgtgacgcggttcagcacgcgatcggcattgccatagtcgtgcacggcgtagtgcatggtgcagcggttatcccacatcactacatcgccctcctgccacatatggcggtagacgttgtccggcgtcaccgagtgctcatacaggaagtcgagcagcggacggctctccgcttcggtcatgccttcgatgcactgcgcggtgtcggggtggccgacataaagcgccttgcgcccggtctccgggtgcgtgcgcacgatcgggtgcaccgccgtcggcaccttgtccgaacccgtcatcctggccagccgcgcccccgagaagcgggcccgcagcccgtcgatcatgcgctgcatcgccggcgacaggcggtcgtacgagacgtactggttgcaccacatggtgtcgccaccgatggggatggtgacggccgacaggatggagatcttcggcggcacctcggtatagatcgagtcggaatgccaggcctcggtcgaggcggtttccttcgggatcctggtgacctgcgccagttccgggaactcggtcaggcccttgagcagcgggttgccctgcaccggcttgccccagcgccgggcgaacgcgacctgcgcggccggctgcagctgctggccgcggaacaccagcacgccatgctccaggaatgcccggtgcaggatctcgaagctggcgtcgtcgagcggctggttcaggtcgacaccggtcacggctgcggccacggagccggtcagcggcttgatctggattgtcatcatgtctcctcttatctatcgcttctctgtggaatcagtcgaccagcaacacgatcttgccgacgtgctggtcttgcttcatgtatgcatgcgcggcgtcgatgtcggtcatggcaaaggtccggtcgatcggcagccgcacgcggcccgcgcgcaaaaagggcagcatgtcgcgcgcgcaggcctggatgcattccagccgctcctgttccgtgcgcgtgcggaaggtcacgccgatcagctgcaggcgcttgagccagagctgcgccaggtcgatctgggcggtcgccgagcccagccgcgcgatattcaccaggcggcccttgaccgccaggctcttcatgttggcctcgaacaccgggccgccgacggtatcgatgatgatgtcgacgcccttgttgtcggtggcctgcaagacggcctcgacctggtcgtcctgcgaggcgtcgatgccgacatccacgccaaactggatgatcttgtcgagcttggccgccgagcgcgaggacgcgatcacgggccgggcgcccatcagcgaggcgatctggatcgtcgccatcgccacgccgcccgaggcgccgttgaccagcaccgactcgcccgccaccaggcggccgttggtaaccagagcgtcatgcgcggtgataaagacgttggggaacgccgcggcatcgatccacgacatgccgtccggcaccgggatcagcgccaacggatcggccaccacatactccgcctggcagccgcggccgtggcccatcacgcggtcgcccttgcgccagccgctgacgccttcaccgacttcggcgatctcgccggcaaattcgacgccggtggtgatggtgttgcccgagcgcagttccttcgcctggttgatctcgccacggttgaggccggcagcgcgcaccctcaccagtacctgccccgctgccgccaccggcacggggatagcctgcacttcgaccttgccgccctcggggcccggcactacacggactgccttcactgttgtctccttatcctgtctctcgacgtgtctcttgctgtgtctgaacttgctatgcgcgtcccagcgccgtcgcgcggatcagcgacagcagttccagcgcccgttcggcagcagcttctccacccggatggttgccgcgcacaaacggcgcccgcgtgtcctcgatggcggccagcgcgtgcagcggcttctccgccgccaccgccagccgccggaattcattgaccgtcagcaggtaggtgtggaacacatccgcctgcggcggcgtcgcgcccagcttgtgcagcagcgcgttcagccagtgcgtgcccgccagcatcgcgccttcgatagtcatctcgtagtcggcgctggtgcacttctgcagcgacgcctcgagactgcgcgcaatcgccatgtgctgctcaatgtccatggcggtctccttccaggcgcgcttccaataagtccaggcagcggcgcagcgcggcatcgcaaccctcggcaatctcggcggtgggtgccaacccttcgcgcagacagggatcacggtagtgctcgatgtgctccatcgcttccatcatcccggcgatatcggcaggcaccagcccctccactttcgggcggccgacatgcagtacgtcgccgagcggccggaacgccggcttcaggctgccgtcgggctgcggcaccaggtagacgccgggttgcgtggggaaccggtcgtcgtccagcgtgatgccggcctggtgcagtgctgcattgacggcatgggtgccagcggtcatgcctgcccagaaccacaggccgaagtcctgcagcggatccaggcgtgcgcgcagggcctgcagcttcgcgatcttctccttgtgtgacatgacgttcatgtccgccttctccgttgattcactgcgtcaatgctccggcgcaaacaacatcgccgttgtcatgacgatagacagcggccggactgatgtcaacaaacttctatataggacttcaactgtaggagtagtggttttctctgagttccgctgttttatccttgactatatggcagccgactccctacatttgacctcaacacctatacaggagttgatcaatgccccgagccatcgtactgaacccggccgacaatgtggccaccctgctggacgccggccaggccggcgaagcctgcgcactggaaggcgagcgacaaggcaggctggtgctgctgcaagacgtgccgttcggccacaagatctgcatcgccgacacggccgagggacaaaccatcgtgaagtacggccaggtcatcggccgcgccagccgcgcggtgcgcgccggagaacacatgcatgttcacaacatcgagtcggcgcgtgcccgcggcgacctgcaaaaggggtaatgcagatgacagcaaccttcctcggatacccgcgcgagaacggcgcggtcggtgtgcgcaactgggtcgcggtggtctccgtgatggacaactgcaatccggtcacccgcaccattgcccgcaccgtgggcggctgcatcccggtcacgacgctgttcgtgcgcggacagttcggcgccgacctggatttcgcattcgagtcgctggccggcctgggccgcaatcccaatatcgccgcggtgctgctggtgggcctggaggaatcgtcgacggaagaagtcgcgcgccgcatccgcagcaccggcaagccggtcgaatgcgtgcacctgcagcccgacggcacggtcgcatgcattgccgaaggcacgcgcaaggccagccgtctgtcgctggccgcgtcgaaggcgcgccgcgtgccatgcccggtgtcgtcgctggtgatcggcgtcgagtgcggcggttctgacaccacttccgggctgagctgcaaccccgtgatcggccgcatggcggacatggtggtcgccggcggcggcaccgtgatcatttccgagacctcggagttcatcggcgccgagcacctgttcgccgagcgcgcggctgatggccgggtgcgcgaggccttcgtcacggcggtgcgcaacatggaagacctggcgatctcgcgcggggtcgacatgcgcgaggaccagccttcgcccgacaacaagcgcggcggcctgaccacggtcgaggaaaaggcgctgggcgcgatggccaaggccggcaccagcccgctggtgggcgtgctgcgctacggcgaggcgccgcagaagaaggggctgcatttcatggacgcgccggccgcggcagtggaaaatctgactgcgctggctgccggcggatgccagctcaccttcttcggcacgggggtgggcaatccgatcggcagcatggtggcaccgaccgtcaaggtgtgcggcaacgtcaataccctgcacaccatggccgacaacattgacttcgacgtcagcggagtcctgcagaacggggacaagatctccgacctcggcgagcagctgtttggctatgcgatggacgtcgcatccggcacgcggctgaccagcgaggtgctcgatatccgggagaccgcggtcagtcgattcgcactgagcctctgaacaaccatgaccaaacttagcagcgtctccgacgcgatcatccgctccatcgaatccggcgacctgcgcgagggcgaccgcctgccctccgagggcgagctcgccagcttccatggagtcagcgtcggcacggtccagaaggcattggcacggctgacgcattccggactgatcacgcgcgaacagggacggggcacctttgtttccgggacgcgcgtggcgccggcggatgtccgttacctgcgcttccgcgatgaacagggcaacgaactgccgtcctacgtccatgcgcgctcggtaaagcggatcaagcgcaagggtccgtggtcggagttcctcgccggtgacggctacgtgcgcatcgagcgcgtgatcagcgtcggcggccgcttcgacctctacagcgagttctggctgcgcgaggaagacttcgcgcaactcggcgggctggaccgcgatgccctggagaagaacctgcgcgagctgatcggccagcgcctgtcgctgccgacgctgcgcgtggaccagtggatccgcttcggcccggccccggccgtggccgcgcaggaacttggtctggaccccgaggcgccggcattcatcatggagttgcgtggctacacgctgcgcgaccagccgctctactaccagtcggtctacgccgccccgttcgcggagcgcctgatgatcgtgcgggagaaatcgacatgagtatccgctggaacactgacagcctcgcgcgctggactgccgccgtgtttgagtcatgcggcgtggcgccagaccaggcgacccaagccgccgccgcgctggtgcgcagcgagctgcgcggctacaagacgcatggcctgacgcgggtcccctcctacgtcgaacgcctgcgtgccggcgatttcaacccacgccccgagatgtcgcacaagaccttcccgggcggcgtcgtgctcgacgccgacggcgccatgggccagatcgcgggcccgcgcgccgtgcaactcggactggaggcgctgcagtcgagcgcgtcggtgctggttgcggtgcaatcgtgcggccatctcggcgcactcggtatcccggcattgctggccgccgaggccggggccttctgcatggtcggccagcgcacgccgcccgtgctgggcatggaaggctttgcccgcgccgcgatcgggcacaaccccattgccttcggctgcccgttgccgggtgcggcaccgatcgtgttcgacgtggcctgcagcgttgccgcacgcggccatatcctgctggccgcccgtgaaggcaagccgattcccgcgggctgggcgctcgacgccgacggccacccgaccaccgatgcgcaacgcgcgctggaaggctcgctgctgcccactggcgggcacaagggcatcggcatcgccatgatggtggagtgcctggccggcgccatggccgccaccgcggactcgctttccccggcgcgcaacactgtcagcggcgccggcgcggtcggccgccagggcggttttgtgtggctggtcaagccggacgcctttgccggcaaggagctgttcgccgactacatggcgcagtggaccggcaactatcttgccgccggcggcgccgacgcccggctacccggacaccgtggcgaagcgctcgagcgcgaaggccgccagcaaggcatcaccctgcccgacgcggtcgtccgggcactggatacgctcggccgggaactcggcatccccctccccggctagcgccgcttccgtcaccagtattgccaggaatccgggtgccaacgcacgccggcagcccccgctcaaccctgtttgcctgaaatcgcccctatgaatgctccaattctccccgacgcggcccggcaggccctgcgagccgtgtcgatcgacgacaagtacgcgctggactccggccgtgcctacatgagcggcgtgcaggcgctggtgcgcctgccgctgctgcagcgcaagcgcgatgccgcggccggccacaacaccgccgcctttatttccggctaccgcggttcacccctgggcacctatgaccaggcgctgtggcaggcaaagaagcatcttgccgacaaccacgtggtcttcaaacccggcgtcaacgaggaactcggcgccacggcggtctggggctcgcagcaactggagttcgataccgccagcaagcgctacgacggcgtgttcggcatctggtatggcaagggccccggcgtcgaccgcagcggcgatgcgctcaagcatgccaacctcgccggcacctcgccgctgggcggcgtgatcgcgctcgccggcgatgaccacgtctccaagagcagcacgctggcccaccagagcgaccacaccttcatggcgtgcgggctgccggtgttcttcccgtccaatgtgcaggacatcctcgacctgggcgtgcatgccctggccatgagccgcttcagcgggctgtgggccggcatgaagaccgtgcaggaggtggtggaatcgggcgcctccgtgaccaccgactcggatcgcgtgcacatcgtgctgccggaagacttcaccctgccagacggcggcctgcatatccgctggcccgacgatccgctcgcggccgaggcgcgcatgatggaattcaagtggccggccgcgctcgcctatgtgcgcgccaaccgcctgaaccacaacgtgatcgagggatccaacgaccgccttggcatcatcgccagcggcaaggcctacagcgacacgcgccaggccctgctcgaccttgggcttgacgatgccacctgccgcgcgctcggcgtccggctgcacaaggtcagcgtggtatggccgctggagcccgacagcgtgcgcgactttgcgcgcgggctgcgcgagatcctggtggtcgaggaaaagcgtcccgtgatcgagcagcagttgaaggacgagctgtaccactacccacccacctcccgcccggccgtctttggcaagtaccaccacgccgacggcgccggcggcgaatggagccaccgcaagccggccgaggactggctgctgcgcgccaaggccgatctctctcccgcgctggtggccaaggccatcgcgcagcggctcaaggcgctgggcgtgccggccgacgtggccgcgcgcatggacgtgcgcctgcaggaaatcgacgccaaggaacgcgccaccgcccagggcgatgcgcgcgccaccgaccgcctcccgtggttctgcccgggctgcccgcacaacaccagcacccgcgtgccggaaggctcggtcgcgacggctggcatcggctgccatggcatggtggtgtggatggaccgctcgaccacctcatggtcgcagatgggcggcgaaggcgtgcactggatgggccaggcacccttcagcaagcgcacccatatgttcgccaacctgggcgacggcacctacaaccactccggcctgctggcggtgcgccagtcgatccacgccggcgtgaacctgacctacaagatcctgttcaacagcgccgtggccatgaccggcggccagccggtggacggccagctcgatgtaccggcgatgtcacgtgaactggccgctgaaggcgcccggcagatcatcgttgtcacggacgagccgggcaagtacaagggtgtcgacgacctcgcagccggcgtcaccgtgcgccaccgcgacgaactcgataccgtgcagcgcgagctgcgcgaggtgtccggcgtgaccgtgatcatctacgaccaggcctgcgccaccaagaagcgccgcgagcgcaagcgcggcaccatgatcgatccggccaggcgcgtggtcatcaacgagctggtgtgcgaaggttgcggcgattgctccgtgcaaagcaactgcctggcggtgcagccggtcgagaccgacttcgggcgcaagcgcaaggtcaaccaggacacctgcaacaaggacttctcctgcaccaagggcttctgcccgagctttgtcacggtcgaaggcggccaactgaagaagcccgccaccaccgcgagcggccgcgccacgcccccggccatcccgatgcccacgctgccggacgccggcaagccgcggcgcatcgtggtggcggggatcggcggcaccggcatcgtcaccatcggcggcgtgctgggcatggccgcccacctcgaaggcaagggcgtgatcacccaggacgcgaccggcatggcgcagatgggcggggccacctggagccacatccagatcgccgccagcccggacgccctgcatgcgagccgcgtcgacatggcaatggccgacctggtgatcgcctgcgataccgtggtcgcggccagcaagacctcgctggccgcgatgtcgccggcacggacctatgtggtgctgaacagccatatcacccccaccgcggcttttgtccgcaaccccgactgggatccccaggtcggcgaggccgtgggcaggatcgcccagtccgtcggcaagggccagctcgccggcttcgacgccgaacaggtggcgaagcagctgctcggccagtcgatctacgccaacctgctgctgctcggctatgcctggcagaaaggcaaggtcccgctgtcgcacgcggccctgatgcgcgccatcgaactcaacggcgtgcaggtcgacagcaacaaggcggccttcgaatggggccggctgtgcgcccacgatatgtcgaagatacccgcgcagccggccggctcgcaggtgatccagttcgtgcgcaaggtgccggtggaggaactcatgaagaagcacgccgaattcctgaccggctaccagaaccggacctacgcggcgcaatacgagtcgtttgtcggacgcgtaaaggcggcggaatcggtcgtcggcggcacccggctgaccgaagccgtggcccgctcgctgttcaagctgatggcctataaagacgaatatgaggtggctcgcctgcataccggagccgcattccgccagcagatcgcgtcgatgttcgaaggcaaggtccggctggtgcaccacctggcccctcccctgtttgcgcggaagagccaggccggcgaactggtcaagggcacctatggcccgtggatgcgcaccgcattcggtgtactggcccgcttcaagggcctgcgcggcacggcattcgatcctttcggctacaccctggagcgcaaggaggagcgggccctgatcggtgaataccggcgcagcgtggaagccttgctgccggcactttccgcgcaaaagctcgagctggcgctggagattgcccggctgccgcaggagatccgcggctacggccacgtcaaggcgcgcaacctggcggccacgcgcacgcgctgggagcggctgatggcgcaatggcatcaagggagcgcaaagccgggacaaatcaaagctactgaagcggcataaaccaaagactgaaccaacgaaagccccgtcaccttcaccggggcccgtcagagacagcgaggagacaacagatgaaatccgtattgaaccgttttggccgtaccctgggcgcgatcgcattggctgcctgcgccaccagcgcgctggcacaaggcggatatcccaaccggccaatccgcatcatcgtgccgtggccggcaggcggcggcgtcgatgccgtcacccgcacggtggccgagaagatgaccgccagcctcgggcagcaagtcgtggtcgacaaccgccccggggcgaccggcaatatcggcgccggcatgggcgccaaggcggcgccggatggctacacgctgctggtcgccagcgcgccgatggcgatcaacgccagcctgcataagaacctgcccttcgacatgggcaaggacttcgcgccgctggggctgatggcaagctcgccgtacatgttggtggtcaacccgtccgtgggcggctcggtcaaggaactggtggcacgggccaaggcggagcccggcaagctcagctatgcctcgcccggcccgggcacccagcagaacgtgatcagcgaggtgttcaaggaaaccgcgcatatcaacgtcgtgcacgcgccgtacaagggcggaccccaggcgctgaccgacatggtgggaggccatatccacatgatgttccacggcgtgccggcggtgatgccgttcgtcaagggcggccagctcaagggcatcgccgtggccagcaagcagcggctgccgttgttccccgacgtgccgaccatggcggaagccggcttcccgggcatagaagccagcgaatggtatggcctggtcgcgcctgccggcacgcccagggagatcgttgcgctgctgagcaaggaaatcgacaaggcgctgaatgcgccaggtgtgcgccagcagcttgtcagcaagggctatgagccggccagccagagctctccggaccagtttgcgacgttcatggcggcagagcagaagaaatgggcgctcgccatcaagcagaccgggttccggctggagtagccggcgcgcggcgcaaccagcctggaccgtaacggttcaggctggcttgtcgacgtagtcatccaccgcactgcccaccgtggggtggaagttcttgtcgccgatcgcttccatcagctcgaagcgcttgagcttgtcgcgcaccgggtccttcatctcggcaaaatgcagcgcgatgccgcgctcgcgcaggatgccgctcagttcacgcagcatgtcggccgaggtgacgtcgacgctggtcaccggttcggccgccaccaccaccctgcgcacgggtgtcggcgattcgtcgatcgcttccatcagccgcgcctggaacagctcggcattggcgaagaacagcggcgcatcccagcggaacagcagcagcccgtcgatgcgctcggcatccgggtagcgcttggtgtcgtggtagccgcgcaggccctcgacacggccgagcacggcatagtgtggccgccagccgtcccacaggaattcgatcactgcaaggaccacggccaggatgatccccgggatcgccccgaacacggcaaccgcggcaaagcagaccatcgacagccagaactcccactgctggatgcggtagatgcgcttcaggtccgcgaactcgaacaggcctatggccgccgcgatcaccaccgccgccagtgcgctgtttggcaggtactgcagcaggttgggcgcgaacatcagcagcagcgccacggccagtgcgcccacgactccggtgagctgggtcttcgcgcccgcggcttcggccaccggcgtacgggacgcgctgctgctgatcggaaagccctggaagaatcccgcggccaggttggcggcgcccaggccgaccatctcctggttcgggtcgacccgggtgttggtgcgcgcggcaaaggtgcgcgacagcacgctggtatccgcgaacgagatcagcgcgacggcaatgccgcccagcaggatcgcaaccaggtccgcgccactgacccagggcacgacaaagcccggcagcccttgcggggtcttgcccagcactttcaccccgttctggtcgagatcgaacatgctgacggccaccgtcgcgacgatcacggcaatcaggatgccgggcacgcgctcgaagcgcttcagcaacaggatcagcaccaggctgcccgcgccgaccgcaaagctgtaccagttggtctcgccgcccaggatcgcccggccgaggctgatcatctcccgcagcgggccggcgtcttcgatcgagatggcgaacagcttgggcaactggctgaccagcacggtgagcgcgatcccgttcatgtagccgtagcggatcggcttggacagcaattcggtaatgaaccccagccgcaacagccccatcacgatgcagaccacgcccgacacgatcgccatcatgctggccaccatgaccgcgcgccccggatcgccgccggagacctgcaacaccaccgccaggattggcgccgccagcgccgaatccggccccagcacgaggatccggctcgggccaagcagggcatacaccagcagcgggaccatggtggcgtagagcccgtagacaccgggcacgccggaggcctcggcgtaggcgatgccgaccggcaccagcatggtcgtgagcaccagaccggcggcgaggtctttcggcagccaggccggctgatagttcttcaacaccagcagtcccgggagccagcgcaaccatccgggtgccttgtcgacttcgcgctgcgcggcgggggtcaggttctggggctgcatgggtcgagttatgccctgggcaggcaaggagtatgcatcgactataggaggtcgcgcttcgacaaatgtgcatcgaagcaaagaaaaaagggattttggattgcgctggcggcaccaggccgaggctcccgcgagccgctccgatgctgcatcgcaacacctcctcgtgctgccacgctgcctgcgcaggtctgcgcgctgtcgacaaccatcagtttctgacaatcccgcgacgggcacatatgatggttgtctggcgggcatgcccgttatccatcaccggggagagaacgatgccgatatccaagagatgcctggtagccggcctggtggcactgggctgcgcctcggcggcgctggcgcagcgcgcatcgaccgagggtgccgcgagcgccatatcggatgccgttcagggcgggaccaatccctatcgccccccgtcggccgccacccaggatcccgaagaggccgcacgcgcgaagtgcgaggagctgaaggagcagtacaacgccacatcaaaaaggcgttcgtaccattccgccccgggcacgcagaacgcgcagggccggaccatccccaagatcgaacgcgacaagacgcgcaagcaactgcagcaggcgtaccgcgacaattgcacgtagccgggatctgtctgatcggcgtggtggaagtggcggacggttcgctgcaggatgcaaatcggagcctgcgccctgccggccaacgtcagcccttcagttcgatcagcagatccttcgccgccacgcgatccccctgctgaacatggactgcggcgatctcgcagtcccgctccgccgcgatatgggtttccatcttcatcgcctccagcgccagcagcgtcgtgcccgcggccacgcgctgccccggctgcaccgccaccgtcacgatcgagcccggcatgggcgcggcgacatgcagcggattgtcgggttcggcaaccggacggccatggcgcgctgccgccgcttgcgtggtgctgcgctgctcgaccagcgtggtgcgcgactgcccgttcagctcgaactggaccttgatgacaccctcttcggcatcggggtgcgtgccttgcagcgagaccagcagggtcttgccggcagcgatgtcgatcgccacttcttcctgcggctgcaggccgtacaggtatgccggcgtgggtaccaccgaggtgtcgctgtagttgcgcacatgcgcgtggtactcgccggcctgcttcgggtacatcaggtacgaagccagctggcggtcgtcgagcggctgctcgcacgccgcttcggccgcggcgcgcgccgcgtcgaggtcgaccggcgggatctggtcgccgggccggtacggcacgggcggctcgccgcgcagcaccttgcgcgacagttccgcggggaagccgtccggcggaaagcccagctcgcccttgaacagcgacaccaccgattcagggaaggcagtctccctggcgggatcgcacacatcggcggcgctcaggtcgttggccaccatcatcaaggccaggtcgccgaccaccttggacgtcggcgtcaccttgacgatgtcgccaaacatctggttgacctcggcataggcccgcgacacctcggtccagcgatgctcgatgccgagcgagcgcgcctgctcgcgcaggttggtgtactggccgccgggcatctcgtggcggtacacgtcggcggtgccggcgcggatttcggattcgaacggcgcgtagtagcggcgcaccccttcccagtacatcgacgcctcgtgcaggcgctccaggctgaggccgggatcgcgctcgctgccggccagggccgcggcgatgctcgacaggttgggttgcgaggtcagcccgctcatggcgtcgagcgcgccgtcgaccgcatcgcagccggcctcgatcgcggccagcgccgaagcggccgagatgccgctggtatcgtgggtatggaaatgcaccggcagcccggtctcttccttgagcgccctgaccagtgccgccgcggcctgcggacggcagatgccggccatgtccttgatgcccagcacgtgcacgccggcctgcttcagctcgcgcgcgatgcctacgtagtacttcaggtcgtatttggcgcgcgacttgtcgaacaggtcgccggtatagcagatcgcgccttcgcacagcgcgccgctctcgccgacagcatcgatcgccacgcgcatgttgcgcacccagttcagtgaatcgaacacgcggaacacatccacgccggcgctggccgcctggcgcacgaagaagcgcaccacgttgtccgcataattggtgtagccaaccgcgttggagccgcgcagcagcatctggaacagcacgttgggaacgcgctcgcgcagttgctcaaggcgctgccacgggtcttccttgaggaagcgcagcgccacgtcgaaggtggcgccgccccagcactccagcgagaacagctgcgacagttcgcgcgcatagaacggcgcgatcggcagcatgtcggcggtgcgcatgcgcgtggcgaacagcgactggtgcgcgtcgcgcatggtggtatcggtcagcagcacctgcttctgctccagcatccagcgcgagaacttctccgcgcccagctcgcgcagccggtcgcgcgtaccgtagggcagcgcgccgccggtgtcgaaggcgggcagcaccggtgcgggcagcggcagcgatggcagcgtgcggccgctcatctccgggtgcccgttgacgctgacctcgcccaggtagcgcagcagcttggtggcgcggtccaggcgcttggtgaacgccagcagttccggcgtcaggtcgataaagcgcgtggtgacgtcgccggaccggaacgagggatggttgatgacgttctcgaggaactgcaggttggacgcgacgccgcggatgcggaactcgcgcagcgcgcggtccatgcgccggatcgattcgggcgcggtcggcgcccaggtggtaaccttgaccagcagcgaatcgtagtacggcgtgatcaccgcgccgccgtaggcggtgccggcgtccaggcgcacgccgaagccggccgcgctgcggtaggcagtgaggcggccgtagtccggcaggaacccgttctccgggtcctcggtggtgatccggcattgcagcgcgtgaccgttgagcgaaatcgcttcctgcaccggcacgcccgcggcgcgcacgacgatctcgccgttctcattgcgcgtgttctcggtcatgccgagatggccgccttcggtcacgcggatctgcgccttgacgatatcgatcccggtgaccatctccgtgaccgtgtgctcgacctggatgcgcggattgacctcgatgaagtagaactggccggagtcggcatccatcaggaactcgaccgtaccggcatgcgtgtagccgaccgcgcgcatcagccgcagggccgattcgcacagcgcggcccggccggcatcgtcgaggtatggcgcgggcgcccgctccaccaccttctggttgcgccgctgcacggtacagtcgcgctcatagagatgcacgaggttgccgtgcgtgtcgccgagcacctgcacttcgacatggcgcgcgttgcgcaccagcttctcgacatacacctcgtcgttgccgaacgcagccagcgcctcgcgccgcgccgcggcgagcgccccctcaaggtcctgctcgcgttccaggacccgcatgccgcgtccgccgccgccccagcttgccttgagcatcagcggatagccgatgccggcggcgaggcgcttgcacgtgtccaggtcatgcggcagcggatcggttgccggcatcaccggcacgcccgcgtcgatcgccgcgttgcgcgccgccaccttgttgccaagcttgcgcatgacctcgggcgacgggccgatccagcggatacccgcgtcgatcacggcctgcgcgaagtccgggttctctgaaaggaagccatagcccggatgaatggcgtcgaccttcgcctgcctggcaatgcgcaggatatcgtcgatgtcgaggtaagccgccagtggcttcttgccctcgccgaccaggtagctctcatcggccttgaagcgatggagcgcgagccggtcttccttcgaatagattgccaccgtgcgcacgttcatctcggcggccgcgcgcatcacgcggatcgcgatctcggaacggttggcaatcagcagggagcggataggggcgtagtccatgggatgcagggaagcgaaccagccgcgcgcaaccgccacggcaggatcaggtgatcggggatgcagcacgggcgcaaggcttgcccgggctgctagtcgtattgggcaaatgggacgtgcgagtccatccagtcatagtgcgccgatgcagcggcccacgcccagttggcccgctttggcgactgctggtcccgatcgccatgctcgcttcggttctggccggcaagtggctgatcgccgtccccggcaagctcgcggctgtgcgcgcgggctccgattcttccgtagtacatcgtggtgccttcctcatcaagaccaggttcgcctgcccacgacgcagcgcgatgcagggcgacggcaggtttgcaggcacgatgaaatacgcgcccgccccgtcctgctgccgcaagaaccgggccacggccggttcaggcaccatccctttgatttggcagaagattttcttccgaggccggcttaacgaatttcagaaatgaaatttttcatttcatgggtgccgcggccaatgcgcgatgcagcacctgtgcctcgcggcaaccgggagggccggcgtgggcaacgtggccaggctgacgacgcccgcccggccacgaatgcaggccttcagcaggccgcggcctggggcgaagccagtgcgcagtatgcgggggcgccggccgtggcaatgcgggcgcagtacgccggctcttccgccctggcgatacgtgcgcaatacgcgggctcttccgccctggccatgcgcgcgcagtacgcaggttcgtccgtcctggcgatgcgtgcacagtacgcggcctcttccgccttggccatgcgtgcgcagtacgcggcctcttccaccttggccatgcgcgcgcagtacgccggtgcctccgtcctggcaatgcgtgcgcagtacgcgggctcgtcggccgctgcccgggcacaatatgcggcagacgtcagcgggctgccgaattcgcgcatgctcagcgcatcgctcgcagcggccatttgcaggaggcgggcctcgtcctccggaccgtcgatgccaacgtaggggtcatggtgaaggacatagccgaagatgcgctcgcaatcgctcgcatagcgcctggtgtccaggatgtgggcatgccagaaggcatccacctgctcgctggggacgacgggcgtgtccggatgcttcgccgccagcttgaggaattgccggtagccgctctccgcctgctccagcgattccggcgaccaatgcgcatgcttctgatgcagcagcttggccttcatcctggaaaagtccagggcgtcgatggcctgccacatgatttcaatagtacggtcctgcatgatctagctccctgttattggactgcttaagcacgcaccggactgacgggcagtcaggcgcgcatcggttgcggtccatgctcgagagcgggaccgttctccatgcggctggccaggaaggcagtgatcttcgccggcggcagcggatggctgaagtagtagccctgcacttcgtcgcagccttcgcggcgcaggaactcgagttgcacctcgttctccacgccttcggcgaccacttcgaggccaagccggtggccaaggccgatcaccgcgctggtaatctgcgtgtcgctgcggctttccggtatgtagcggacgaagctgccgtcgatcttgaccgtatcgatcgggaagcggctcaggtaggcgagcgaggagtagccagtgccgaagtcgtcgatcgccagccggacaccggtgcgcttcaggcgcgagagccagctggacgcctgttcggcatcgcgcatgaccatgctctcggtgagttcaagctccagcaggttgccgggcagcccggcttgccgcagggcatcgatgatggtcagcctgagcgacttgtcggcgaactgccgtgccgaaagattgactgaaacacgcaccggcggcagtccctgcgcgcgccatgcggcattctgccggcacgcttcgcgcagggcccaggcaccgatctcgacaatggcgccgctctgctccgcgaagggaatgaaatctccgggcatgaccaggccgagttccgggtggcgccagcggatcagtgcctcgaccgccgtgcacgctcccgacgcgagcgcaatgcgcggctggtagtagaggatgaattcgtcctgctcgagcgcgcggtgcaggtgcgactccatgtcgatgcgccgctgcagcgacgcgctcatgccccggcagtagaactggtagccgttcttgccgagctgcttggcaccatacatggccaggtcggcatgcttgagcagggtctgccagtcgctgccgtcctcggggaaggaactgatgccgatgcttgccgtcatgcgcagttccgactcgttgacgacgaagcctggcgcgagcgcagcctggatccgggcaatggtccggtccaggatcgtcgaatcgcccttggggtccagcagcacgacgaattcatcgccgccgaagcgggtgatcagctccacctcctccaggctgccgcgcaaccggtcggccatctcgcgcagcacgatgtcgccggcattgtggccgatggtgtcgttcacgaccttgaattcgtccaggtccacgaagatgacatgcagggcctggccgctggcgcgggcacgggtcagcgcctgctcgaactcggccttgaacatgaggcggttgggcagcccggtaagggcatcgtgattggcgatgaagcgcaggttttcctcggcctggcgccgcagcaggaagtgcccggtctgattggcaatgccgctcgccatcgcgagcgcatgcgtatcggggctgcgcttgctgcgggaatagagttcgaccacgccgaggctcacgtggccccggctcagcgggaaggcgaacaccgtccggataccgcccgcgtcgagccacctggcttgcggatgccgggccatcgcgctgcggcttgcataccattgcggcgccggcaagaccgcggcgccggccggccctgcagggcgctcggcgagccacggctgcagcgtcttgacgcgggccaggtagaccggcggcagcttcagcccctggctgtcatcgcccggccagaaggcaccggcctcccagtccatgccttcgagcagcgtgtggacaatcccctccaacacctcgatctcgctggtggcggtggccaggtgcagggcaatctggtgttcctgcgtcctggcctgctcggcggacctgcgctggctgatgtcctgcgcggtgccccgcagcactgcgctgtccggcgctccatgcgcgtggccgatcaggtgcagccagccccggcgtccgcgccgcgaccggtacgggcactcgaactcgaacggctggcgatcctgcagggctgtccgcatcctttcccgcagcacggcgcgatggccggcgtcgatcgcctggaacagcgcttccggagtcggcttgtcgccgcgcaagcctagcaggcgcgccatttcctgggaaaagtgcgcgatgtcctggtccaggtcgatgcgccagtcgcccaggtgggcaatctgctgcgcctcggcaagcgcggcctggctgtcgcgcaggctgtgcgtcatctggtcggccacggccacggcgcgcgcgcgcgaactcgacaacgcgtaggccagccaccccagcagcacgctgatgatcaggccggaaatcaccaccagccccggcaggtagcgctgcggaccactgatggccttggcatcggcagcaaacgcaatcacccagcgccgtccgccgaaattccgcaccacgctcttggccaggtcatgctggcccggggccgcctgggcgtccgccagtgcggtcgcgccatgcgcggcactggcgtggacggtgctgccgccagcaacccggctgcgttccctggccgccaggccggtcacgctgtcatagagcaggttggctgcagagagcggaaccgccgcctgcgcgaagtctccggcatcatgcacgcggaaccggatccggcgcaggttctcattgctgaccaggtccttcagcaggtcgtccacccggatccccgcgccaaccgagccgacataggcgcgccggcgcgcttccacggaatccaggtcgggcaccttgcggtacaccggcaggcgcagcgcgatgcccacatgcgggttctttgcctcgctgaagatcaggcgcccgctgctgactggctgcccggtatcgcgcgcgcgttccagcgcggccaggcggcgtggctcggcgcccatgtcgatgccgatcgacgccaggttgagggcgagcggttcgacataggtcagcacgaaatgccccggccgctggccgggagggcggacgttgaacgtcacgccggcctcgcgcaggatcggatcgctgcgctgccgggcgacaaaggcgtcgatctcggccgccggcacgtagggcgcgtagttcagcgtctggaaaccgggatagcgctgcggcaggttcaagccgctgacgaaatcgcgaaactcgccgcgcgagacatggtcgctggcgccgaacagcgcctgcatggtcaccagaacatcggtatagaggcggatccgtgtatcgatctgctggatcacgtcgccggtatcgttctcaaaacgcaggcggacgtccttctcaagcaggtcggtgcagaacgcatagacgacagccgtcgtcatcacgccaagcagcaaggtgcccgcggtgatggtgcgcgacccaaggcgtccaagcgggcgcagcgcgcgcgcaagcgtctggcgcaagattgtttccccccggatgtcgatggcaaccatgcggctgaacggccgtcaccaacgactgatgctaatagtgcacttattggctggggttccatgcgaaacccacgctcttatatgtcttaacaatctataacaagcggcgaaaaacgggccctgattttcgcggcgcaaatccccaacttaagtggggtggcagttctgcgagatatggagatgaacattcaggttcagccccagggtggcaagtgtcgcgctgcggtgcgcgtcatggcttgccagccggcgcggcagcgcgtcggcatggtccaggcaatggatgatgaagtacgtgtcgtccgggtccatcggtgctgctccgcatgctgccgtcaagaggctacgggcacgggcggcgcgctcgcggccggcatcggcgtcgaggcccaggccagcatctgccacgcgccctgatggcgcctccacacgctgagaaagcggttgtcgagcgcgcgctccgtcccgtcgaccacggccctgagcagggccttgccctgcatcacggccatgtcgccgtagaccgcctgccccacctccgccaggctcgcttgcaggtagcgcacccgcccgctgcggatcgagccaaggtactccgccttgctctcgcgcaatgccgaggagtgcgtataggaaagctcgtcggccagcagggcatcgagcgcagccaggtcgccggacagcatggcgcgatagcgcgcctgatcggcttgcgtgagtgcggcaaggtccgcggcttcgcccaatgccatcgtcgtggtctccaggtcagccatgaaggtaagccttcaccagggtcttgtcgttcagcagcgcctgccattcgccgcgccggacttcatggatcacgcgccccactgacagcacgtaggcgcgatccgtcatgtccgcggcgatcgccacgctttgttcgaccagcaagatgctcagcccgcgcgcgcgcagctggttcagcaccgccaggatctccttgacgatgcggggcgccaggccggtggtgagttcatccatgatcagcaggtcgggctggagcaacagcgcgcgcgcgatcgccaccatctgctgctgccccccggacagcagcccgaccgcgctgtcggcacgttcgcgcagcagcgcaaacagatcgcatacatcgtcataggtgtagcgcagcgcgccgccgcgggcgcgcttgccggcctgctcggccaggcgcaggttgtcgcgcaccgacagctcggcaaacaggttgcggttttccagcactacgccgatgccatgcctgaagcggcgatgcccggggacatggccgatctccgccccgtccttgacgatgctgccggccatcggccggatcaggccggccagcgtgcgcaccagcgcggtcttgccggcgccgttggcgcccaccaccgccaccgcctcgcccggcgcgaccgtcatgtcgacatcgtgcagcaccggcaccgcgccgtaaccggcgcgcaggcctttcacgttcagcatggtcagactcccagataggcttcacgcacgcgcggatcggcctgcacctcgtgcagcgccccgctggcgatgatttcaccgtaatagaggacatgggccgtaccgcagatcgtcatcagccccatgtcgtgcgagaccagcaggatggtcatgccctcctggtgcaggcgcacgatccatgcgcgcagcagttcgatctcttcgctgttcagccccgacgacggctcgtccagcaacagcagttccggattgccgatgcaggcacgcgccagttcgacgatgcgccgctggcccgccgggagggtgccggcccggtgctgcagcaagcgctccagcccgaatttgccggcgcatgccagcgcggcgtcgtgcatggccgccagctcgcggcgcgacgccggcgtgcgcagcatcgcctgcagcacgccagcgtgggtggccttgtggcagcctgccatcaggttctcgagcacggtcatgtgctcgaacacctgtggcgtctggaaggtgcgcaccaggccggcgcggctgcgctgctggacggtgtcggcggtgatgtcccgccccgccagcgacaccttgccccccttcgggcgcagaaagccggagacgatattgaagcaggtggtcttgccgctgccgttcggaccgatcaggccgacgatatggccggccggcacgtcgaagctgacattgcgcagcacctccagcccgccgaagctgtgcgcgaccgcgtcgaggcgcagtaatgcctgcgccgggcgcacggcttgtggcgccgtgccaaaagcaggaacgggatggttcatcagacttgctccgaaaaacctcgcccttcagggcggggagtgaaaggagtgctgccggcagcaagcaatcccaaattagaatgaccggcatgcctctcgtctatcgctaccgggtgaagtcgctgaacggcctgctcaatcagcagagccgcgcggtgaactacgtctggaacttctgcaatgacacgcagaagcacgcgctcaaatggggcaagaagtggcccacgggtttcgatctgaacgtgctgacgaccggcagcagcaaggaactccgtatccattccggcacaatcaacgcggtttgcgagcagtacgccaagtcgcgtagccagcaccgccggccgtgcctgcgctatcgcggccgcaagtcgctcggttgggcaccgctcaagggccgggatctcaagcgctcgggcgacggattccgctttgccggcgtgttcagctcccgcccccttcccgagggcaagatcaaggacggcaccaatttctcccgcgatgcgcgaggcaattggttcctgaacatcgtgattgaagttgccgacacccaggcccggcccccggaacgcggcgtcggcatcgatcttggcttgaaggaccttgccacgctgtccaccggcgaaaaggtcgagaatccgcgccaccttggccgactcgagcaagcgctggccaaggcgcagcgtgcgcgcaagaaacgacaggccacgaacctcgacgcgcgcatcaaaaatgggcggcgtgactttctgcacaagctctcgcatcgcatcgtgcgggacttcgactacatcgcggtggggaatgtgaacgccgccggcctcgccaagaccagcgtggcgaagtccgtcctcgatgcgggctggtcgtccttccgcacaatgctcgcgtacaaggcgattgtgcatggcgcgtggtacgaggaagtcgacgaacgtttcaccacccaggtttgttcttcgtgcgacgcgatgccgccggagaggccgaaaggtatcgcagaccttggaataaggcagtgggtatgcagtggatgcggtgctgtacatgatcgcgatgtgaacgctgcgctaaatgtccttgcccgatcgggacatcgatcgcctgcagagggaaactcctccctttagggaggggaggatgtcaacttgcctccttcagtccgcgcatgcgctgcagcgcaccagcgatgccgcccgtcatcccgccgggcatcagcgtgaccaccagcaccagcaccgcgccgaacagcacctggtggaaatcccccagcccgctcagcagttccggcacgagcgagacgaacagcgcaccaaggatcacgccataggtggagcgggcacccgccaccaccggcaccagcagaaacacgatggagcgctccaccgtaaagctctgcacgctgacgaacgacacatagtgggcaaacaaggtcccggccagcgagcccagcatggccgacagcacgaacatcgaggtcttcagccggtgcatgtccacgcccagcacctgcgccgccggcgcggcatcgcgcatcgcccgcatggccaggcccgggcggcccttgaccaggttgtcgaccagccacagcagcaccgcgagcagcggccagacgaagtagtagtagcgctccggggtgtccagcacatagccgaaccaggacagcttgggaatgccgccgattcccagcgtgccgccggtcagccagtcccactcgaagaacagcacgttggcgatgcttcccaccgccagcgtcgccagcgccaggaagaagccgcccaggcgcagcaccggcacgccgatggccgcagccagcgcggcgctgatggccagcccggcggccgcaccggccaacgccggccagcccagcgccgtggtgcagtacgccgaggcgtatgcgccgatgccgtagaacgaggcctgcgccaggttgacgatgccgcactgccccagcagcaggcccacgccaaggccgcccacggccaggatggcggcgaagttgagcaggtcgacgtggtgccgcgacagcagctgcccggccgccacccacagcaacacgccagccaggatgaacgcgcgtgacgggttcatggttatcctcccttgcgcccggcccggcccagcacgccgttgggcagcagaatcatgatgacgatcaggatcgacagcgcgatcacgtcgcgatagccagacgggaaacccaccaccgccagcgattccgccaggccgagcagcaggcctcccgccacggccccgagcggattgcccaggccgccgagaatggccgcggcaaagcccttcagcgtgaggccgatgcccatctggtagttcatcgacagcagcggcgtgaccagcacgccggcgatcgcgccgaacccgccgccgagcaggaacgtgtacgtgcgcatgcggcgcacgttgatgccggtggtggtggcgccatccggatcgagcgaggcagcggtcatggccaggcccgccagggtcctggtgtagaacaggcgcagcgcaccgaccagcagcaccgcaatgccggtcagcgccagcgcatgcacgggcgtggtagcgccgaacagctccaccaccccctccccaccgagcgccggcagcaggtgcgaatcccggccgccgaagtagagcgccgcggccgacagcgcaaaggccaggccaatggtcagcagcaggaagctctcttcgccggcgccgcggcgcagcatcggccgcacgaacagcacgtcgatggccaggccgctgacggcaccggcggcaatgccgccggcaatcgccaacgcatatggcaggcccagcgccttcagcgcgaacaccgccaccagcgcgccgatcaccgcgaactcgccctgcatcgcattgacgatacgcgtgcccttgaagatgatggccatgcccacgccgatcagcgcgtagacgaagccattggtgatcccggacaggatcgcctggaatacgagggtagtggacataccagctcctttcccgcgagcgtcgcaggctatggtttggccttgtagggcagccgctcgaaccggcccttctgcagcttcgagtacgtgaagccggccagcgtcatgccgcccatgtcgggcgcggcgaagtcgtagccgctggtgacgccctggtaaggccggcgcaacgcgctgcacagcttgtcgcccggcgcatcggcaccggccgccttcaggcccgcggccaaggccatgaccgcatcccagcccaccgccgagaaatgcttgggcagcttgccgtactccttgcggaaggcctcgacgaattccttctgtcccggcagcgggtcttcggacacgatgaactcgggatggatgatgttgtccgcggcctcgcccatggccttgacggtctcgtaggtagccgtgccatgcacggagatgatgggaacgccgaccttcagctggcgcacgttgcggaacggcgcgggcgaggtcgagatgacgatgatggcatccggcgtggccgccttgatcttggccgcctgcgtggtgacatcggtggcggcgatctcgaacttctccacctgtatgaagctgacgccgtactcgcgatccagcgtcttcaggctggtccataccacctgcccatagcccgagtcatgcagcacgccgacgcgcttcaggccgttgtcgcgcgcataggccagcacggcacgcgcgttgagctcctgcgacggcgtcaggtggaacacgcaatggcgttcgcgctccaccgcgggccccagtcccgagaacgagaacagtggcaccttctgcgcctgtgtgatgccgccgatggcaaccgtctgggcaatgcccgatggcccgacgatggcgcgaaccttgtgcgtatggagcagcgcgttcgccttggcgacggcggaatccgggctggagccgtcgtcttcgacaatcatttccagcggccgcccgccaatacccccacgggcattgacgaccttctgcgccagcagcgcgccttcgcgctcggcctggcccacggcggcaaggccgccggtgatcgagaacaggccgccgatgcggaccggttcggcgccgggcttgccctgggccagcaccggcggcatcgccaggaccagggcaagcccggcggcggcaaacaaggcgcgtggcgcccgggtgatcgggttgtggttcatgtctccgtccttgttgtaggtatcgggttggcccgattacactgcgccgggcacgcctgcccactcgagcacatcggccagcgcggcgatgtcgagatggccctgccggcgctgctgcatcagcgccaggtattgccgcaccagcgacgacatcggcagcgcgaccgcgttgtcgcgggccaccgccaatgccaggtcgaggtccttcaccaccagcgagatcgggccgacggcggcgtagtcgcgctgcttgagctgctctgccttggtgcggtagtgggcgctgccgacgatgctgtcgttgatcgcatcgaccatcagcgcgcggttcagcccggcgcgcgcgccgaaggccagcccttcgccgatcaccgcggtgctcatgaacaccatcatgttgatcatcagcttgatgacgcgggcctcgtccgcgccgcccacgtatgactggcgcgcggtcaggcacgcgaggacgggctgcaccgcgtcgaaggccggccgcggcccggatacgaaacagctcagctgcgcgctcgccgccagcgataccgtacccgacaccggcgcgcgcagaaaagcggcgccgcgccgcgcgagcgcggcagccacctctgccgaggcatcgggcgagaccgtgctcatgtcgacaaagaccttgtccgccgtcgcggcgccggcaacgccgccggaggccaggaacaggtcgcgcagcccgccatcgtcaaagatcgttgagaacaccacatccgagtccgccaccagtgcctgcgcggcaggcgccactgccgcccctgcggcggccaccgcctcgcactgcgccggcacgcggtcaaagaccgtgagccggtagccggctttcagcaggttcaggcacatcggtcggcccatggcaccaacgccgatccatccaagccgcggtgattgcaccgcgtgcgcgttgcttgtgttgatcatggcccgcccccctactcgaccctgacgccggacagctcgaccagcttgcgcgtctggcgcgtctgcgtctcgatgtactgcgagaactgcgccgggctcagcttcatcggcaccatcccctgcgcggcgaagtgcttctcgacgaagtccttgtcgtccaggatctcgcggatggtggcgttcagcttgtcgaccaccgcgcgcggcaccttggccggggccagcacgccgtagacggccgagatgtccatgtccttgtagccggcctcggcaaaggtgggcacctgcggcagcgcgcgcgtgcgcttgtcgccgctgacggcgagcaccttgagtttctttgccgcaacaaagctctggatcgtcggcagcgccgggaaggtcatcaggatctggccgccgacgacgtctgccaccgccggcgccgagcccttgtacggcacgtggaccaggtcggtgccggccagcttgttgaacagcgcgcccatcaggtgcggctggctgccgctgccgaacgagccgtagctgagggcttgcggacggcccttggcatatgcggccaggtccttgacgctgtccaccggcaggctgcccgagacggccatgacgagcggcacgtagccgatcgtcgccaccggggcaaagtcgcgcgcgacgttgtacgacaccgacggcagcaccaccgggttgagcacgaaggtggcatcgttggtcagcagcagcgtgtagccgtcgggctgcgccttggccaccgcgtcggcgccgatcacggtattggcgccgctcttgttttccaccaccaccggctggcccagcttctcggacatgcgctgcgccagttgcctggcgatgatgtcggtggttccgcccggtgcgtaaggcaccaccatgcggatcggctgcgcgggataggtctgcgccagtgcggcgcccgtgcctgccaggcaggccaggccgaaggctgcggcacgcagcgcgtgggtcgtatgaaattgccaggacatagggtctccatccattgtctgtgtcgacggtgccggctcggacggccggctgccgtcaggggatcattcagtcaaagagccagggctccaattgccgccgcgcctgctcgtaatcccggatctgcccggcatggcgcagcgccagcgcgatatcgtccaggccgttcagcaggcagtgctgcttgaacggatccagcgtgaaggcaatggcctcgcccgacggcgtcaccacctgcagcgcggccaggtccacctgcagccggtagcccggcgtggccgcggtctcggcgaacaggcgctcgaccacgtccggcgccgccacgatcggcagcaggccgttcttcaggcagttgttgtagaagatatcggcaaagctgggcgcgatcagcgcgcgcaggccgaagtcctccagcgcccacggcgcatgctcgcgcgatgagccgcaaccgaagttctcgcgcgccagcaggatcgaggcgccgcggtagcgcggctggttcagcacgaaatccgggttgaggggccggctgctgcagtcctgtccgggctcgccgtggtccaggtagcgccagtcgtcgaacaggtaggggccgaagccgctgcgccggatcgacttcaggaactgcttgggcaggatggcgtcggtatcgacattggctcggtccagcggcgccaccaggccgtccagcgtagtaaaggctctcattgctcggtttcctccggtggtctacagcgagcgcacatcgatgaagtggcccgccaccgcggccgcggccgccatctgcgggctgaccaggtgggtacgcccgcccggcccctgcctgccttcgaagttgcggttggaagtggaagcgcagcgttcgccggccgccaggcggtcatcgttcatgcccaggcacatcgagcagcccggttcgcgccattcgaagccggcggcgatgaacacctggtccagcccctcggcctcggcctgcgacttgaccagcccggagcccggtaccgccagcgcctgcctgatgcgcggcgagacatggcgcccgcgcagcaccgccgccgcggcgcgcaggtcttccaggcgcgcattggtgcatgagccgatgaataccttgtccagcgcgaccgcctcgatcggcgtattcggcagcaggcccatgtagtccagcgcctgctcgatgctcttgcgccgcaccgggtcgcgctcgtcgcgcggatcgggaatgcgctcgccgacggccaccaccatttccggcgaggtgccccaggtcacgtgcgggcggatcgcggtggcatccagctccaccacggcatcgaaggcggcgcccggatcgctgcgcagcgtgcgccagtagccggtggcggcgtcccacatcgcaccggccggtgcttgcgggcggccgtccaggtaggccagcgtggtttcatccaccgccaccatgccggcgcgcgcgcccgcttcgatcgccatgttgcacacggtcatgcgcgcctccatgctgaggccgcggatcgtgctgccggcaaactcgatcacgtggccggtggcgccggcagtgccgatacggccgatcagcgccagcgcgatatccttggcggacacgccacggggcagctcgccgtccacccgcacctgcatcgacctgggcttcttcatccacaggcattgcgcggccagcacctgctccacttcggaagtgccgatgccgaacgcaaacgctgcgaacgcgccgtgtgttgacgtgtgcgagtcgccgcaggcaatgctcatgccgggcaaggtggcgccgcgctccggaccgaccacgtgcaggatgccctggcgcggatcgtccatgccgaaattgacgatgccggtgtctgcgcagttctggtccagggcctcgacctgcgcgcggctgacgggatcggcaatgcccagcttgcgcgcggtggtcggcacgttgtggtcggccgttgccagcacggaagcggcgcgccacaccttgcgcgcgttcaggcgcaggccttcgaaggcctgcgggctggtcacctcgttgaccaggtggcggtcgatatagatcagcgcgggtccgtccggctcctggtggatcacgtggctggcccagagcttgtcgagcaggctcgccgggcggtcgggttcggtcatgggggtctctccttgtatttctcgtggcggacgcgggttaccttgcgcccacccactcaggcaccggatgcagctcggtggtcttgccggccttgaccacctgcccggaaatatcgtgtccgaccagcgccggcagctcgcgcgccgcgccgagcagccggtccaggtcgacaccggtgtcgatgccggaagactccagcatgtgcaccaggtcttccgtgcagatgttgccggtcgcgcccggcgcaaaggggcagccgcccagcccgcccagcgacgcatcgaaactgtccacgcccgccgccaggccggccagcacattggccaggcccatgccgcgcgtgttgtggaaatgcagggtcagcggcacgcccgggaaccagcgcaggaacgcctcgaccagcttgctcacctggcgcgggtcggccatgccggtggtatcggccagcgtgatgctgtccatgcccaggtccaggtagcggcccgcggcccacttcacccgttccggcgcgatctcgccttcgaacgggcagccgaacgcggtcgccacgcagccgctgacggccagctcggccgactgcgccagctgcatcacgccgcggaactgctccagcgactggtcgcaggtcatgcgcatgttggccaggttgtgcgtctcgctggcggacatcaccaggttgatctcgtcgaggtcgcactccagtgcgcgctcgcagccgcgcgcattgggcaccagcgcggtgtagaccacgtcccgttggcggcggatgcctttcgcgaccgcccctgcatcgcgcaggttcgggatcgccttgggcgagacaaacgaggtgatctcgatcctggccaggccggtttccgagaggcggtcgatcagcgcgatcttctgttcggtggggacgaattccggctcgatctggaagccgtcgcgcacggacacttcattgatgcgcacgcgccggggggcgttaggaagccacatggttctttcctttctttccttttcgttggggcgggctcagaccacgccggcggcgcgcagcgcgcgcagctcgtcgccggcaataccgatgcccgccaggatctcttcggtgtgctggcccagttcggggccgatccacctggtgcgccccggggtcccgctgagcttgggcacgatgccggacagctccaccggcgagccatccggcaactggtgcggctcgatcatgtcgcgcgcgcggtagtgcgcgtcgctgctgatctccgccgcggtgtagatctttccgcagggcacggccgcggcttccagcgttgccagcactgtgtcgaggtcatgcgcggaggtccacgcggtgatggcgtcgtcgagcatggcgttgtgctgcacgcgcccgtcgttgtgcgccaggcgcgggtcctggcccaggtcgtcgcggccgatggcggccatgaagcgccggaagatggcgtcgccgttgccggcaatgatcacgtactggccgtcctggcacggatacgtattcgacggcgagatgcccggcaggctggcgcccgaacgctcgcgcacatggccgaacttggcgtactccggcaccaggctctccatcacggcaaagaccgactcatagagcgccacgtcgacaaactgcccttcgccctggttggcgcgcaggtggtgcatggccagcaaggcgccgatgacgccatacagcgatgccagcgtgtcgccgatgctcacgcccgagcgcaccggcggccggtcgggatagccgctgacatagcgcagcccgcccatcgattccgcaatcgcggcaaagccggggcggtccttgtagggtccggtctggccgtagccggagatgcgcaccatgaccagcgcggggttcaccttgcgcaggtcctcccagcccaggccccatttctcgagcgtgccggggcggaagttctcgatcacgatatcggcttcggtgaccagcttgcgcacgatctcctggccctgcgccgaacgcaggtccagcgtcagcgacttcttgttgcggctctggctataccaccagagcgaggtgccttcatacagcttgcgccacttgcgcagcgggtcgccgtccttgggcgattcgatcttcagcacttcggcgccgaactgcgcgagcagtccgcccgcatacgggcctgcgatcagcgagccgagttcgatcacgcggacgccctgcagcggcatcgttccgttgttcgcttcgttagccatggcggtttgctgctcctgtggatacggtggtctgtgatgcaagattggaagaacccgcgcgcgcggtaaagcaaccattggcgagcccgccatcgcgaaaaacgatggcagcgctggcgcgctattcatcctcgcgcagccggtccaccagcagccgcgccaccgcggacaggccctcatacgcacgcacgccgatcaccagctggcgcgcggcccacgcttcatcgagcgcgacggtgcggatgccaagggtctgctggtaaggcccggcactggacctgggcaggattcccaggcccagtcccgcctgcaccatcaggcacagcgcgtcgtagccgggcacgtggatgcgcggcttgaacacgcggccggcctcgctggcagccttggccagctgcaggtggatctggctgcctgcgtgcaggctgacgaagtcgtagtcgaaggcctcgcggatggtcaccgagtgccgcccggccagcggatgcgcgccgggcaccaccacgaccagttcgtcgcgccggtaggggaacgtctccagctccgcacccaccgcgcccgcggtgaagatgccgatgtccgcggcgttctcggccaccgcgcgcacgatggcggtgctgacgcgctcttccaggtgcacgtcgatcagcgggtactcggccaggaacgacttgagctgcgccggcaggaactgcgtgatggccgagatattggccatcaccctcacctgcccgcgcaagccgccgccgtagtcgcgcatgcgcaccaggatgtcatcgaggttgtgcagcacgccgcgcgccaggtgcgccagctccatcccggccatggtcggctgcacgcccttgttgctgcgcatcagcaaggcggtgcccagcccctgctccagttcgctcacgcgcttgctgaccgcggccgcggcaaggtgcgcgtgctccgccgccgcggcgatggagccggtttcggccacggcgacaaacaggcgcagcgaagtggggtcgagtctcatgatgcgatgtctcccggatccggtggcctgcgatggccccggcccttgtgttgcatgcggtccgttgcggctaaaatacggccatgacctccgccgccaaaccgtccgcccccgtcgacaacgacgctccgccgaagctcgaggaaggccaccgcgactacgtcgcggcgctggcgcggggcctggcggtgatccaggcctttaccgagaccacgccggaactgacgctgagcgaagtggcgcaggccaccggcatgacgcccgcgaccgcgcgccgcgcgctgctgacgctgcaggcgctgggctatatcggcgccaacggccgccgcttcgtgctgctgcccaaggtgctgtcgctgggcgccgccttcctcagctcgatgaacctgcgcgacatcgtgcagccgttcctgcaggaggtggccgagcgcttccgcgattcggtctcgcttgccatcctcgacggcgacagcgtggtctacctggcgcatgtgcccagccgccggcgcatcgccttccgggcttcggtgggttaccggctgccggtccattgcacctcccttggcctggccttgctggcgcacgcgcccaaggcccagcagaacaagatcctcgacaaggcgccattccagaaattcaccccgctgacactcagcgatgccgacgcgctgcgcgcggcgctggcacgcgcgctcgagcagggctatgccatccaggacagccagctggagctgggcgtgctgtcgatcgccgtgccggtgcgtgacccgcaacagcgcgtgatcgccgccatcaactgctccaccgaaaccgagcgcaccagcccggacgaactggtcgccacccggctgccggcgctgcgcgaagccgccgcgtcgatcgaggcggcgatccggcgcgcaccggcgctggcgcactccattaccgccgcctcctgagcggcctcgcgcgccggcttactgcgccgtttcaggctgcagcacgatatccaggttgaccagctggtagccgtcgcgctccgggtgcggcagcgcgtcgacgatgtggtcgtcgatggttgagaagatgcagtcgaccggattggccggatcaccggcgaaatacagctgcgacgtcaggttccggtagcctggctgcatcacccggtagtggatgtgcggcgcgcgctgccggttgcggcccagccgcttcatcagcacgcccacttcggtatcctcgcggccgatgatgtagccacccgggcggatggtgaacacctggaagctgccatcggcctcgcaacgcagcttgccgcgcaggttgtcttccgactgcgagtcatcttcgttctcatagcggccgaactggttgggctgccatacgatcatcatcgcgcccggtaccggcttgccggtggcggcatccagcacgcggccgcgcacctccagccgctggccaggctcgtcgtcggtggcgatatggcatgggttggagccttcggcgatctcgtccttggggaacggaccggtcacgttctgcggcgtggcgtggtcatcggtgcgtgccaggtccagcgcgcgcatggtcaggcccatcatgtcgcacagcatgatcagttcatcctgctgggccaccttgcctatccaggtggcgatccggtagagctgccggtcggtcagcttcagttcgtccagcatggcgtggaagtgcttcagcgccacgcggaactgcgcctgcaggaccgggtccgcgccgggcgcatcgctgcacatggcatcgaaggcgcgttgcagggtgtagttgtcggggttgttcatcgctgtctccggtgattctgtgtcagtggctggcggcggccatgtcgatggcgcgggcgaacagggttccatccgctttcagcttgtgcttggccggcttgtgcgtaggggtgtgcggaatggcatccacggcgacgacatagcgcggcagcttgtgcacggccagccggtcccgagcccaggcgagcaactcgcccggctcgaccgactgcccggggcggaactgcaccgccagcaggatctcttcttcgcccaggtccgccggcacgccgatggccgccgcttcctcgactgcggggtgctcgccgaagatgcggtcgagctcggctcccgacacgttctcgcccttgcggcggatcacgtccttcttgcgtgcgacgaacacgtagtagccatcgctgtcctggcgcaccagatcgccggtggcaaaccacccgtcgcggaacgcggcctcggtctgcacggcgtcgcggtagtagccctgcatcagcgtcggggtgcggatcagcagttcgcccgcggcgccgggtgccacgtcgtggccgtcgtcatcgacgatgcgcgcctcgggcaccggcacggccgggtccgggtgcggcgagatcaggcccatggtgccgagcttgtgcgggccgttgaacggattggcgatgacgccggggatttccgtcatgccgtagcactcgatcaggcgcggcacgtggaattcctgcttcatcacccgcaccatctcctgggtctgcggcgcaatgaacatcttggtaatgcgatggcccggcacgaattccgcgcgcgggcgccgcgccaggatgctgccggcggcggccaccaggttgacctcggtcgcgccgctctcggccgcgaagcgccagaacgacgaggccgagaaacggcgcatcagcaccaggcagccgccgcaggccagcgccccgcccaccgaatacatcaacgcattgatatggaacagcggcatcacgcacatcacgcgctcgtccggctgcaagtgcaggcggccgacaaaggcctcggcggtcagcacgtagccgcgatggctgtgcatggcgcccttgggaaagccggtggtgcctgaggtgtagatgatcagggcggtgctgcggtcgctgtcgacgcccggggcagcgttggccggctgcgccgcatgcgccgcgatcgatgcggccagcgtcggcacgccgtgatcgccatcctcgttggcgcgcagccagacgtcaccgcccaggtccgcggccacggcggcgccggtcgccagcgtgccgggcgcgcacaccaggccgcacacctgcgcgtgccggaatacgtacagcgcctcgtcgagccggtactcgggattggccggcaccatggtcgcgccgatacgggccagcgcgaacatcagcaccacggtggacggatggttggtcgagagcacgccgacacggtcgccgggtccgacttgcatcgcctgcgccagccagtccgcggtgaggccgatccgttggtcgagctggcgatagctccaggtctcgccctcgaacacaagcgccggcttgtccgggtgcgccgccacgcgggcggcaaggaaaccggtgagcgtggcatcgtgggcgcggtactgcctgagcacatcgagcggcgccaccagcgcgtcgccggccggggatgcgagcggcttcatgatgcttgcgccggcgcggcgctgtaggtgatggcgtgttcggcggcgtcggccaggataaagccgatgggttgcgcgcgctcttcctgcaggtgggcgatcaggctcgccacgcgggccagcatcggtacgcccttgagcgcgctggcgggatagccggcgtcgagcagcaccgcggggatcgcgcccgacacattgagcggcaaggccttgctgtagtgctcggggaccgccgcggccaccgcctcgagcgcggcgacgtggtcgcccgcgatgccgagttcacgcgcgaatgccagcaggcggtgcgcgcgcggatcgccctgcttgtgcgtgggatggccgaagcccggcagcggctgccgcgcctgccgcaaggcccgcaccaccgcgtgcgcgctgtctgccagcgtgccggcgtcccggccggccagcacttgcgccagcatctgcccggcggtttccgaggcccccaggatcaccgagccgcagcccagcacgcccgcggccaccgcgccctgcagggcgtcgggggcggcggcgagcgtcatgcgcgcggcctgcaccgagggcaccagtccgtgttcggcaatggcgaccaggcaggcatcggtgatggccaccagcttttcgcccggctggcggccggtaagcaggaacagaaagtaggccgtaaagccgatcttgccgatcagttcctggctgagatccttgccatgcaccgacaccccgtggaggtccacatgggcaatggcggtgtggccggtgcgtttggcatccgtcacgttgtctcctatttttgcgctacgcgcaatctaatgcgttatacgaattattctagagcgtgccacagtgcattgcaaggtcgggaatacctgcaccgggagccagccggcactgcgccaggcgcagcgccggcacatcatcaggcacggtccgacggatcggtctcgccgatccgggcgagcgcgccatcggtgaagggatcgacctcgcgtaccgcgccgtccaggtacggatcggccttgcgcgctgcgaccttgcggaactgctcgtccaccagccggcccggctgcgaacgctgtgccgacccggccgaggggatcgagccatgtgccgcacgcgcgccatctgtatagacatcgggcgaccgcaccgcggcctgggccgccgaagccatcaccagcaccactgctgcgccaaacattgccgttttcatcacttgctcctgttaagcatcgaagagaagagcgccggttctggccggggtctggggtccagcccttcagcgcgtcgcccatggtggcaaatataattaaaaccgtaccgtatggtattcttaaattcgaaatgagtcgttctgatttattgaagccatgagcttgtcacatggggaaacgcagcagcctgccggcttttggtagactgcgcagggcccccggcatggggtgcgccgccacgcctgcaccagatgaactctccagaaagcgcttccccccctgtggtccaccacccgcccgtgcgcatcacgcgccgcggcgaagagaaacgcgcgctgatcctgagcaccgccgcggacatgttcctggaacatggctatgacggcgtcagcctggatgacatcgtcaaggcgtgcggcggctccaagaccaacgtgtacagctatttcggcggcaaggacggactcttcgtcgcggtggtggagcggctatgcgaccgcttcctggagaagacagagaaaggactggacctgtcgcgctgcaacgccgcgcagggcctgcacaggattgcgcacagcttcctgcattcgctgctggaagaacggcacctggcgttcctgcggctgatctttgcggagtcgcggcgctttccggcgctgggcaatgcctggtacacgcgcggcccggaggcaacgtgcgcctatatcgcggccttcctgtccgcgcagcaggccaacggcatccgtcttgcggcaagtcccgaggccagcgcccggctcttccacggcatggtgctggccagcgtgctgcaccggacgctggcaaccggcatgcggccggacgaaagcgagaccggtgcgctgatcaacaacgccatcgccgtgatcgtgccccaggactgaaatcgcagcgcggatcgctcatcgcgccgggatgtccgagatgccttgaatgcgcgatcctctggcacaaggcatctgatgggccagaaaaacaaaaaccccggaagaccgcgatcttccggggtttcgccgccatgactggcggagacggagggattcgaaccctcgatccaggttttggcccggatgctcccttagcaggggagtgccttcgacctctcggccacgtctcccaaacttgcgttgtgtgagggagccacacaacgaagcgcgtattctagcggcgccgcacgtgttggtcaacgaaaaatcgatcactcaacacaaaaatcgcggccccgccagaagtgttcacgaacggatcacgcctgttccagttcgaaggccttgtgcagcgcgcgcacggccagttccatgtacttctcgtcgatcagcaccgagatcttgatttccgaggtggagatcatctggatgttgatgccctcttccgacagggtgcggaacatcttgctggcgatgcccacgtgcgagcgcatgcccacgcccaccaccgacaccttcgataccttcgggtcgcccgacacgctgccggcgccgatatgcgacttcacgccgtcgttcaggatggccagcgcgcgctggtactcgccgcgcggcacggtgaaggtgaagtcggtcttgccgtcgacggactggttctggatgatcatgtcgacgtcgatgttggcgtcggcgaccgggcccaggatctggtaggcgatgcccggcttgtccggcacgcccagaacggtgatcttggcttcgtcacgggcaaaggcgatgccggagatgacggctgcttccatggtggagtcttcctcaaaagtgatcagcgtgcccgagtgcatttcctgctcgagcggcataagcgggtcggtcagcgacgacagcacgcgagtcttcacgcggtacttgccggcgaactccacggagcggatctgcagcaccttggagccgaggctggccatttccagcatttcttcgaaggtgatctggtccaggcggcgggcgtcttcgaccacgcgcgggtcggtggtgtacacgccgtcgacgtcggtgtagatcaggcactcgtcggcttcgatcgcggcggcgatggccacggccgaggtgtccgagccgccacggccgagggtggtgatgttgccgtcgtcgtcgatgccctggaaaccggtgatcacgaccacgcggccggcgtcgaggtcggccaggatgcgctcgtcgtcgatcgattcgatacgggccttggtataggccgagtcggtcttcaccggcacttgccagccggtgtagctgaccgcgtcaatgtcttcgccgtgcagcgcgatggccagcagtgccacgctggcctgttcgccggtcgaggcgagcatgtccagctcacgcggattgggctgcggcgaaatttccttggcgagtcccaacaggcgattggtctcgcccgacatggccgaaggcaccacgactacgcggtgaccggcgcggtgccatttggccacgcgcttggcgacattcttgatgcgttccgtggaacccatcgaagtgccgccgtatttgtgaacgatgagagccatcttcttgtcgacgccagcgattatgcaaagcccttgaaaatacacgaacaagcccagtcaggcaaggcgggagcgggattcggctgcagatcggaagtgatgccgacggcgatccgaccgcttcagtgcggcggcatcgccactgccggcggccgcggatgccactcgacgcgccagcgcggcgccgccggggcgtccggccagcggcggtgcatgccgaggccggcggccagcaccagggtatcgccagaccacagcagcggcagccaggcgcggcgccaggccgggatgccggcttcctggcaggcttgcttcagggcccgggccggaccgcccgggcgcagcacgatacgctcgccgccactgcgggcggccaggcgcaagggctggcgcagcgccgcttcgggcacgccgaaggtgtcatcgcggaagaaatggagttcgccgcgccagccgggcacgacgatacgggcctcgccgcgccagtccagcatcacgggtgccggcgcggcaatcggtggcggcgtgcaggccagcacgcggtcgcggaagcggcgcaggaccagcccttcatgcgcgatcgcgggctcgccgccagcgtgggcgaccagttgctcgcgcatcgccgccagcctggcggtggacggcgcgcgcacgccgaggtcgcgcagccagaagcgcagcacggcatcggcatgtgccacgggcaaggcgcgcagccctgccaggtcgagttcggcaagcgtgtcggcatcgcggccggggcgtgccagcgccgccagcgaggcggctgccagttcatcgatcagtgcgcctgcctgggcgaaatgcgctgccgcctgcaccacgttggccgacaacgccggaaaggccgcgaccagcgccggcaggtgcgcgcgcaaggcattgcgcgcatagcgctcatcggcattggacgggtcgtcgacccattgcagcgcgttggccgcgcagtaggcctcgatctcggcgcgggccacatccagccaggggcgcagcagcgtcacgccgctgcgctcgtcgagcgggcgcagccctggcatgccggccatgccggccacgccggcgccgcggaacagccgcagcagcacggtctcgacctggtcgtcctggtggtgggcaaacagcagcaggcgcgcgccactatcggcgcacatcgccgccagcgcggcgtagcgcgcgcggcgcgcggccgcttccacgccctcgcccacttcgggctgcaccgacacccgccgcacgaaatagccgacctgccactgcgcgcacagcgcggcgcagaagcggtcccagtcgtccgcatccgcctgcaggccgtggtggacatgcagcgccaccacgcgcgcgccaacgccccactccgccgcggccgcacgggcggcatgcagcagcgcgaccgaatcgcgcccgcccgacagggccaccgcgatcgtcgccgcgcccgtgccgccgccagaaacaacaaaggccgcaccggcctggagggcctgtgcgaccttgtcggtcagccgggcggacgggtcagtcctgggtgccggtttccttgaacttgccataggcgagcaggcgctcgtagcggcgggcctgcagctccttcacgctcatgccctggaactggcgcagcgactcggccagcgagcgcttgagcatcgccgccatgcccttgtagtcacggtgcgcgccgcccagcggctcgctcacgatcttgtcgatcaggcccagcgccttcaggcggtgcgcggtcaggcccagcgcctcggcggcttccggtgccttctcggcggtcttccacaggatcgaggcacagccttccggcgagatcaccgcgtaggtggcgaactgcagcatctgcaccacgtcgcccacggcaatcgccagcgcgccgcccgaaccgccttcaccgatgatggtggcgatcaggggcaccttcaggccggccatcacgtacaggttgtggccgatggcttcggactggccgcgctcttcggcgtcgatgccggggaatgcgcccggggtgtcgacgaaggtgaagatcggcaggccgaacttgtccgccagctccatcaggcgcttggccttgcggtagccctcgggcttgggcatgccgaaattgcgcatggcgcgctctttcgtatcacggcccttctggtggccgatgaccatgcacgcctggccgttgaagcgcgccaggccgccgatgatcgaaagatcgtcggcaaaggtgcggtcgccgtgcagctcgtggaaatcggtaaagatctcgcgcacgtagtccagcgtatagggacgctgggggtggcgggcgatttgcgcaacctgccacggggtcaggttggcgtagatgtctttggtcagctgctggctcttgccagccagccgcgaaatctcttcggaaatatcaacagccgaatcgtcctgcacaaagcgcagttcttcgatctttgcctcgagttcggcaatgggctgctcaaaatccaggaaggtggttttcataaaatcacacgtacctgtctgtgaaggggcgcattctaccggaatttggtcgctatcttagcgcctgccagatagcccggactgcacctgccactaaattttcttgctgcaatgcctaatacgtcactgggagcgggtcaagactgcgccacatataccacgtggccacggttcgccagggctcccagttggccgccacctcgcgcgcctcgctgcgcgtgaccggctcgccgctgaagtaattggcggagatcgcgttgatcaggccgatgtcatcaaggggcagcacgttgggccgcatcaggttgaacatcaggaacatctcggcggtccagcggccgatgccgcgtatctgcgtcagctccgcaattaccgcttcgtcgtccatctgcgcccattcgccgacatgcaccgtgcccgccttgaaatggtcggccaggtcgaccaggtattcccccttgcgcttcgacaggccgcaaccggccagcttctcgggaccggcgcgcaggaactgtgccggggtcagcctggggcacagggcatgcagccgctcccacaccgactgtgccgccttgaccgagatctgctggcccaccaccgcgcgcgccagcgtgacgaacggatccccgcgcgacaccaggtgcgccgggccgtaggtcgggatcatcttgcgcaggatgcggtcgcgcttcatcaggtcggcgcaggcctcgtcccagtaggcggggcgcaccgcgtcgatgacggtttcgaccggcagcggcaccgcatccgcttcgggcagcacggccttggcgttgcgcgtgtccctggccgtgtccttgccgtcaggcagcggcgcctccttggcgccagccttgcccgggcgcggaccggccgccttcacccggcccctcgtggcgggaggcgtggcgatggcgggcttgcgcgcggcagcgttcaagcacgcctccactcggtggcaccgcccggcttgtcttccagcacgatgccagcttccagcagttgcgcacggatgcggtccgcttcggcaaagttgcgctccaccttggcggtcttgcgcgcggcgatcagggtctcgatctgttccggcgagatgccgtcgtcggacctgccgccttgcaggaaggtatgcggatcgcgctcgagcaggcccagcgtgcctgccagccccttgagctggcgcgcagccgcggtcgagccggtgcggttgatctcgctggccagatcgaacagtaccgacatcgcaatcggcgtgttgaagtcgtcgcccatggcctcggcaaagcgcctggcgtgcggctcgtcccagtccaccgcgcagccgcccggctggctgtccttgagcgccgtgtacaggcgtgtcagggcgtgacgcgcatcgtccaggtgcgcgtcgctgtagttcagcgggctgcggtagtgcgcgcgcaggatgaagaagcgcacgacctcggcgtcgtacgacttcaggacctcgcggatggtgaagaaattgccaagcgacttggacattttttcgtcgttgatgcgcacgaagccgttgtgcatccacatgttgacgaagggcttgccgctggcgccttcagactgcgcaatctcgttctcgtggtgcgggaactgcaggtctgccccgccgccatggatgtcgaaatgctcgcccagcagcgtgcagctcatggcggagcattcaatgtgccagcccgggcggccggcgccccacttcgagtcccacttgctctcgggcggctcgctggccttggcggacttccaaagcacgaagtcgagcgggtcctgcttggcgtcgttggcgctgacacgctcgccggcgcgcaggtcttccagcgacttgcccgagagcttgccgtagccggcgaacttgcgcaccgaatagttcacgtcgccgtcgctggcctggtaggccaggcccttggcttccagcttgccgatcatgtcgagcatctgcggcacgtagtcggtggcgcgcggctcgtggtcggggcggatcacgcccagcgcggcggcatcctcgtgcatgtactggatgaagcgcgtggtcagctcgccgatggtctcgccgttctcggccgcgcggcggatgatcttgtcgtcgatgtcggtgatgttctgcacatacgtcacctcgtagccggcggcacgcagccagcggtgcaccatgtcgaacaccaccatcacgcgagcgtggccaacgtgacaatagtcgtacaccgtcatgccgcacacatacatgcggaccttgccgggttcgattggcacgaatggctgtttctcacgcgcgagcgtgttgtagatgttcagaagctgcatgaaacgaagtgagtggtgagaggagactgccggggttcgcacagcaggcagcacgggccgtggcgccggttgcccggcgcctggcaggccgccggcggcaacgcggccactggcgcaattccgtcgcgccccatatcttaccggaaggcgctgcgctggttgcctccggcacggcgccgccagcgccgcgcgagatgccgcgcccgctgccccgatgtcatcgccttcgtgccggacttgccgctttgctagaatgccgcggagtataacggacctgtcctcaatgagcctgccgctgccctccccgtcttctgccatgttcgccgcccccgcgcgccgacgcggccatcgcgccgtactgcccctgctggccctggccgccgcgctggcggcccctgcctacgcgcagaacggcccgctgtcgctggccgcgccgacgacgccggtcggcggcatccagtcgaccgatcctggcatgagcgaggcccagcaggccgccaacgcacgccgctacgacgaagccatcaagggcttcgaccgcgtgctggccgccaacccgcgcaatgcccaggcacgcttccagcgcgcctgggccctggcccagtccggccgcgaggacgccgccatccaggcctttgccgaaatggcgcaggagttcccggaactgcccgagccccacaacaacctggcgctgctctacgccaagcgcggcgacctgaagcgcgccgaggccgagttgctgctggccaccgaagtcaagccgggctttgccatcggctataccaacctgggcgacgtctaccgccgcctggccgagcaggcctacgccgaagcgctgcgccgcaatccgggcgatacccgcgccagtgccggcctgcgccagctgaaccctgatgccgcggcgccggccaagccggcggcgcccgccggcaccggccgcaaggcgacgccaacgcagcgccaggcacctgccagcgcccctgcagccaactgacggccactcatcccaaggtccgggcgcggcgcgcccggaccatgtgcatcatccagacataccggagttccttcatgatccgttcccgccgcatcgtcctggccggcctgaccgcaggcgccctggcactgtactcgttcagcgcgctggctcagcaggccgccgagcgcgtccagttcgtcaccagtgccggcaagttcaccgtcgagctctaccccgaggccgcgcccaggaccgtcgcgaacttcctggaatatgtgaagagcggcttctacagtggcaccatcttccatcgcgtgatcaatggcttcatggtgcagggcggcggcttcgaccgcgacatgaaggaaaagcccacccgtgctccgatcccgctggaagcccgcggcggcctgaagaacaaggccggcacggtggccatggcacgcaccagcgaccccaactcggccaccgcgcagttcttcgtcaatgtggtggataatccgaatctcgactacccgcagccggacggcaacggctacgcagtgttcggcaaggtggtggaaggcatggagacgatcgacaagatcaagagcgtgccgaccacggcctacggccccatgcgcaatgtgccggccgcgccgatcgtgatcgagtcggccaccgtcgtcaaataacactatcgaacagaggaaatcccatgtccaaggtccagctccacaccaaccagggtgtcatcaccattgaactcgacgccgaaaaggccccgaagtcggtcgagaacttcctgtcgtacgtgcgcaagggccactacgacaacaccatcttccaccgcgtgatcaagaacttcatgatccagggcggcggcttcgagcccggcatgaagcaaaagggcaccgacgccccgatcgagaacgaagccggcaacggcctgaagaacgaccgctacaccgtggccatggcgcgcaccaacgccccgcactcggccaccgcccagttcttcatcaacgtggtcgacaacgacttcctgaacttctcctcgcccacgccgcagggcttcggctatgccgtgttcggcaaggtcgtggaaggcaccgacgtggtcgaccagatcaagggcgtgcgcaccggcagctcgggcttccaccaggacgtgccgctggaagacgtggtgatcgagaaggccgtcatcgtcgagtaagccgatgcctgacgattgcggttccgtgcgcatccacgtgccggcattccccttccgacaccgcgcatgaccgcaatcccccacacgccggtggccggtcccttcgaggcacaggcgcctgcgtggttcatttcagacctgcacctgacgcccggcatgccccgcacgctggcggccttcgagcgcacgctcgagcgcgccgcgcagcacgcgcgcacgctgttcatcctgggcgacttctttgaattctggatcggcgacgaagaaaccgactcgcccttcgcgcagcgcgtgaccgcagccctgcgcgcactggcagcgcgcggcgtggctgtgtacctgatgcacggcaaccgcgacttcctgctgggccagcgcttcgccagcgctgccggtgccagcctgctgcccgaccccgccgtgatccactgtgccggccagcgcgtggtgctgagccacggcgacatgctgtgcatcgacgacgaacgctataaccgcttccgccgctggacccgcaagcgctgggtgcaacgcgtgttcctggcactgccgctgagcgcgcgtctgtcgatcgcccgcaagctgcgggcagacagtgaaggcaaccgcgccaggcagttgagcgcgggagcggccgttccggtgatttatggtgacgtggcgcccgcggccgcggccgagttgctcggcgccgccggtgcgtcgctgctggtgcatggacacacgcaccgcccggcacggcatgaggaagccgccggcgtgcgctgggtactcactgactgggacctggacggcgcccatccgcgcgccgcggtgctgcaactagatcgcgacggcttccgcctgttgccgcagaccgactgagcggcagcgccggcccggcccctttcccgctcacttcatcagcctgcgcagttcgctcgcatcgaagggatcgttcggcgtattctccaggtgttcgccaagccggtcgagcgcggccagcaccgcctcgatgcggtcgtgctggcgccccgcattgtcgatcaggctcttgagcgccagcgacaccggatcgtccgcattgggcgtgatgccataggccgagaactcctgcttggcaccctgctgcgccgatggcgcatccggcaggatgatgcgtgccgggatgcccacggcggtcgcgcccggcggcaccggctttagcaccaccgcgttggagcccacgcgcgcgccgtcgcccaccacgaatccgcccagcaccttggcgcccgcgctcaccaccacgttggcgcccagcgtggggtgccgcttctggcctttgtacagcgaggtgccgcccagcgtcacgccctggtagatggtgcagtcatcgccgatctcggcggtctcgccgatcaccacgcccatgccgtggtcgatgaacacgcgccggcccagcttgaccgccggatggatttcgatgccggtgaaaaaccgcgcccagtgcgagatccaacgccccagccagtggaagcccgcgttccagcatcgatgcgcaaagcggtggaacaccacggcatgcaggccggggtagcaggtcagcacttccaggcggctgcgcgcggcgggatcgcgcagcatgatggtgtcgatatcttccttcaggcgagagaacatcttggtcgtgtcgtgttgccgcgccgtgcgccgcgccacgcgggctggtgcccggggcagggtcgccggcgaggtcagtggccggtggggacgggatcagggagtgtaagtgatttgccgggcccgcttggggtaccggtgtttggcccctgatccgtcagggacattgcggcgatgctgcgatcaacatcgcccgggcctgcgcaaacccgcagccgcggggcgacagcacgcgcgcttgccgcgcgtgcctgcctcgccctgcatcgaatcgctccggtttgctgccactgtccttgctcctgtcaccggtccttgtgcgggcccggctggttctgcgcggcgatcagcatatgcttggcgatgccgcgcaggatattcacttcctcgcgctccaggccgctgcgtgccagcagccggcgcagccgggtcatcagcctgcgcgggttggacggatcgagaaaaccgattgcctccaggcccgtctgcagatggccgaacatggcctcgacctgctcggccgtggccggctcaccagcatagccgatattggcgccggcgtccggggccgcctccagcagcgccagccgcatctcgtaggcgatgagctgcactgcctgcgccaggttgagcgaggtataggcggggttggcgggaatatgggtgactgcgttgcagcgctcgaccacttcattgggcaggccatagcgctcgttgccgaacacgaaggcaacgccgccgctgccggacagcgtctggcgcgcacgttccgctgcagcgcgcggcagcagccgcggcgggccgaattcgcggtggcgcgcggtcatcgccacggtcagcgcggcgccggccagcgccgcgtcgacctgatcgacgatgagcgcgcctgccagcacatcgtcggcgccgctggccatggcgacggcgtcggagtgccgcagcacatccggctcgcgtggcgagaccagcaccaggctgccgaagcccatggtcttgatcgcgcgcgccaccgagcccacgttgcccgggtggctggtttcgaccagcacgaagcgcacgcggccaaaagcgttgccgccggtatcaccgctgttgccatcggcagcgggctggctcgtatcaattgccgggttcatatacaattcggggttcttctttggcgcggcgccaggtttttgcttgctcgcgagactctcgcggcacatttgcagcagaaccggcgacgcccgacgttcttctacaatccgttgtgttgtcagctgcccatgagcgggcgtgcggcgcttttgcgccccgccgcgtcgtcgtggccggcctggagagattcatgcatccgatgctcaatatcgccatcaaggcggcccgcaaggcgggatccatcatcaaccgcgcgtcgctcgacgtcgatctggtgcgcgtctcgcgcaagcaacacaacgattttgtcaccgaggtggaccgcgccgccgaagccgcggtgatcgagatcctgcgcacggcctacccggaacacggcattctagcggaagaatccggccagtcctgggccgagggtgaagactcccacgagtacacctgggtcatcgacccgctggacggcaccaccaactttatccacggcttcccgcaatacgcggtctcgatcgcccagctgcaccgcggcacgcccgtgcaggccgtggtctacgacccgacccgcgacgagctcttcaccgccagcaagggcgccggcgccttcctgaacaaccgccgcatccgcgttacgcgccgcgacaagctggccgactgcctgatcggcaccggcttcccgttccgcgacctggaaggcctggacgaatacatggaattgttcgcgctgatgacccgcaactgcgccggcctgcgccgcccgggcgccgccgcgctggacctggcctatgtggcctgcggccgcctggacggcttcttcgagcgcggcctgcagccgtgggacatggctgcaggcatgctgctgatcaccgaatcgggcggcctggtcggcaactacgccggcgagccgcgccagatggaacagggcgaagtgctggccggcaatcccaaggcgttcgcccagatggtgcgcctgctgtcgccgttctcgctcgacaacgccaagcccgccgcctgacaccggcacatggcctgacggccagatcagccacaccccgacgcccgccgcaccccggcgggctttttgcatggtgcgccccgcgtgccaccgcacccagcactgcagacctttctcattcccgagacggccatgatcctcgtcaaggtcgccccaccctgccctccccaaaatgaaaccatgcgccacgccccgtgcgcgcggatccatcaggagagccagcatgtttcccgaataccgcgaccagatcaccaccctgaagacccaggatgcccgcttcgcgcgcctgttccaccgccacaacgcgctggaccaggaaatccacaacatggagtcggggctggtgccggcctccaccttcgagatcgagcggctgaagaaagagaaactcctgctcaaggaccagctctacgcgatcctgcgcaacaccgcagcctgacggaggaccgcagatgacagatcgcgacaccatccaatcctcccacaccgccaccgcgccacgtgcccgcgccacggccaggggtgacgtgctgcccaccaactcggcgctttcagcccagcgcaacgaagtcgacagcgccgtcgacgcctcggtgcagctggcggccagcagcatgcaggacatcctggccagccgcgcaggcaacggcgccgacatgctcgacgccatgcgcacgctgcttgacggcctggcgcccgacgaggccgcgcagctgcgcagcctgatcctcgaaggcgatcccgccgcgtggcaggccggccgcaagcgccacccggacgacgagctgtccgcgggctggcgcgaaggcgcgtacccgtaccagaacctgatgtcgcggcgcaattatgaaaagcagaagtaccgcctgcaggtggagctgctcaagttccaggcctgggtgcgcgagaccggccagcgcgtggtaatcgtattcgaagggcgcgacgccgccggcaagggcggcaccatcaaacgcttcatggaacacatgaacccgcgcggcgcgcgcgtggtggcgctggaaaaacccaccgaggccgagcgcgggcaatggtacttccagcgctatgtgcagcacctgccgtcggccggcgagatcgtgctgttcgaccgctcctggtacaaccgcgccggcgttgagcacgtgatgggcttctgctcgcagcgcgaataccaggacttcctgcagcaggcgccggacttcgagcggcatctggtgcgcagcggcatccacctgttcaagttctggttctcggtcagccagaaggaacagcgccggcgcttccgcgagcgcgagatccacccgctcaagcaatggaagctgagcccggtcgaccttgcctcgctggacaaatgggacgaatacacccaggccaaggaggccatgttcgcccacaccgacaccgccgatgcgccgtggacggtcatccgctcggactgcaagaagcgcgcgcggctcaatgcgctgcgcgccatcctgtcgcgcttcccctacggcaaccgggacaccactgccatcgggcagcccgacccgctgatcgtggggcgcgcgctggccaattgaacttcgccccctactcccgcacttcttccgttttccctttaccaaggcccctatgttcaagcacatcctgctgcccgtcgacggttccgagctttcccacaaggccgtgtccgccgccatccagtttgcccgcaccgcctccgcgcgcctgacgccctacatgtgcgtggagacctacccctacatggtgggcagcgacagcacccatgagcggcgcgaagtgttccagcaacgcgtggaagcactggcgcgccaggaactggtcaagatcgaggccgcggcggcaatggccggcgtccgctgcgcgggccacgtctcggccgccagcgccccatatcacggcatcatcaacgccgcgcgggacctcggttgcgacgtcatcttcatggcctcgcacggccgcaagggcatcagcgggctgctgctgggcagcgagacgcagaaggtactgacacacagcgacgtgccggtgctggtgttccgctgacggcacgccgctgaccccgccgccgggccggatccggcccgcgcggcgcggcaaccgctgccccgtgctgtaccatatcgtccatattcgaaaacgccccttcgcgccccggccccgggccgtcggatgaccgcccggacgccccgcgcggccgctatccggcttgcgcaaggcggcgatccgagcggagcgggcggcatcacgcaggcccaccgccagacaggctgaatggcaatgggattgcagaagaaaaccgacccggaacaggcgcaggcagattcggccgcaagccgccacacgccaatgatgcagcaatacctgcgcatcaaggcagaccaccccgacaccctgctgttctaccgcatgggtgacttctacgaactcttccacgacgatgccgaaaaggccgcgcgcctgctcgacatcacgctgaccgcgcgcggcgcctccaacggggtgccgatccgcatggccggcatccccttccactcggcggaccagtacctggcgcgcctggtgaagctgggcgaatccgtggcgatctgcgagcagatcggcgacccggccaccagcaaggggccggtggagcgcaaggtggtgcgcatcgtcaccccgggcacgctcaccgacgccgcgctgctgccggacaaggccgataccttcctgatggcggtgcaccagcagaccacgcgccgcggcgtcagcaagaccgggctggcatggctgaacctggccagcggcgagctgcgcctgatggaatgcgaagcagcgcagctgggccgcgagctggagcgcatccgcccggccgagctgctgtatgccgatggcatcgagctgcccgcgctggcgtgcgcgcgtacccgcctgcccgaatggcatttcgaccaggacgccggcacgcgccggctgcgcgagcagctgggcgtggccagcctggacccgttcggctgtgccgggctgggtgccgcgctgggcgcggccggcgcgctgctgaactacgcggccaccacgcagggccagtcgttgcgccatgtgcagggcgtgaaggtcgagcgcgaatcggagtacgtcggcctggattccgccacgcggcgcaacctggaactgaccgagaccctgcgcggcggcgagtcgccgacgctgttctcgctgctggacacctgctgcacggccatgggcagccgcgcgctgcgccactggctgcaccacccgctgcgcgacccggcgctgccgcaggcacgccagcaggccatcggcgtgctgatcgaccagggcaccgatgccctgcgcacggcgctgcgccggctggccgacgtcgagcgcatcacctcgcggctggcgctgctcaatgcgcggccgcgcgacctgtcctcgctgcgcgacaccttgcgcgcgctaccggacgtgcaggcctgcatccgcgatgaccagggcagcaccttgctggcgcagtccctgcacgacctggccgtgccgcaggactgcctggacctgctggtgcgcgccgtggccgaagagccggccaccgtggtgcgcgacggcggcgtgatcgcgcgcggctacgatgccggactggatgaactgcgcgacatctccgagaactgcggccagttcctgatcgacctggaaacgcgcgaacgcgcccgtaccggcattgccaacctgcgcgtcgagttcaaccgcgtgcatggcttctatatcgaggtcaccaacggccaggccgacaaggtgcccgacgactaccgccgccgccagacgctgaagaatgccgagcgctacatcacgcctgagctgaaggccttcgaagacaaggcgctgttggcgcaggaccgcgcgctcgcgcgcgagaagcagctctacgacggcctgctgcaggcgctgctgccgcacatcggcgagttgcagcgggtggcgggcgcgctggcgcgcctggacgtgctgacggcactggccgagcgcgcgcagacgctggactggtccgcgcctgagcgcgtcgccgagaacgtggtcgacatcgtgcagggccgccacccggtggtcgaaggccaactcgcggccgagtcggtggcgttcatcgccaacgactgccagctcaacgaagcgcgcaagctcttgctgatcaccggcccgaacatgggcggcaagtcgaccttcatgcgccagaccgcgctgatcgtgctgctggcctgtgtcggcgcctacgtgccagcgcggcgcgcggtgatcgggccgatcgaccgcatctttacccgcatcggcgccgccgatgacctcgcgggcggccgctccaccttcatggtcgagatgaccgaggccgccggcatcctgcaccacgcgaccccggcttcgctggtgctgatggacgagatcgggcgcggcacgtcgaccttcgacgggctggcgctggcctgggcgatcgcgcgtcacctgctgtcgcacaaccgcagccataccctcttcgccacgcattacttcgagctgacgcagctgccgcaagagtttccgcaggcagccaacgtgcacctgtcggcggtcgagcatggcgatggcattgtcttcctgcacgcagtgcaggacggccccgccagccagagctacggcctgcaggtagcgcagctggccggcgtgccgcagccggtgatccgcgccgcgcgcaagcacctggcctggctggagcagcaatcggccgacgccacgcccacgccgcagctggacctgttcgcggcaccgccaacgccggatgacgacgaggacgacttcggcgctgccccgtcggccgtgcccgcgccgctggcacccacgctcgcacccgaacaggccgcgctggtcgatgcgctggccaacctggatcccgacaccctgacgccgcgcgcagcgctggaggcgctgtaccggctcaaggcactggcaggcgaggcgctcgacgccgcatgaacgctgcacgccgtgccctgcttgccatgctgctgccgctgctttgcacggccggcatggcatcggccgcgcccgcgggccgcgccggcaaggcaccggccaggccaaagctgacgcgcatcgcgctgatcgccgacctgccccagtggccggccgcggaggccaacgcggcggcactgctcgactacttcggcgagcgcaagctggacctggtcattcatgccggcggcatcaagggcgatacggagtcgtgcagcgatgcggtgctgggcaaccgccagcaattgctggaccagtcgccgctgccgctggtctacgtgcccggagagaccgactggtccgaatgccggctgccggtcaacggcggctttgacgcggtcgagcgcctgaaccggctgcgtgagctgttcttccccgaggacgccacgctcggccggcatccgcgaccgctgcaccggcagtcggaccaggcgctgttccgcagcttccgcgagaacatgcgcatggaggtggccgatatcctgctcgtcggcatgaacctgccgggtgacaacaaccactaccgcgacgaaggcgggcgcaacggcgagttcgaggaccggcgcgaggccaaccgccagtggctggcgcgcgcgttctcggtggcgcggcaacgcgacctgaacggcatcgtggtggtggtccacgccgacccgcattttgccaacggctgggagaagaaaggccgcccgacgctgctggacggcttcatgcgccaccgcacccgcgacggctacctggaattcaagcgccagctgcgcgagctggccggtcgtttccgcggccaggtgctgctggtgcatgcgggcggaaacggggccaacggggcggacaacggcttcggcatcgacaagccgctgcgcgatgcggccggcaaggtcatgcagaacttcacgcgtgtgtcactgcccgccaacacggtctcgcaatgggccgaactggtgatcacgccgggcgcggcctcaccgttcgcagtcatgctcaaggacgcaccggcaccgcgctgagaccgcttgccggcccgacaacgaaaaagccggctgcggccggctttttcctggggtgcggaatacgaaccgtgcagcgcgatcagtgcagcgtgcgcggcgtgtcgtcgtcctcgtcctcatcgacgacttcaacgcccgaggcgccatgggcgtggccgtgctcgatttcctcggcggtggcctcgcggacttcggagaccttcagccagaagcgcagcgccatgccggccagcggatggttgccatccagcacgaccttgtcctcggccacgtcggtcacggtatagatgacggagtcctcttcgtcgccatcttcgggcatgccttcgaactgcatgccgacttccagcggctcggggaagcggttgcgcggctcgaccttcaccatatcggcgtcatagtcgccgaacgcgtcttccggctccagctgcaactgggtctcgaagcccgcgtcatgaccgtcgagcgcttcctcgatcttggggaacgtgccatcatacccgccgtgcaaataaaccatggcttcatctgactcctcgatcagattgccttgcgcgtccgacagcttgtacatcacggacaccacagtattcttagcgattttcaattcttgactccatgaacgattccgcattatacgcgcaggccctgccccctggccccgtcgatccagacactccgctcgacctgcttggtggcatgacgcctgctgcattcatgcgggatatctggcatcgcaagcccctgctgattcgacaggcagtacccggaatcgtgccgcctgtgtcgcgcgaggctcttttcgacctggccgacagcgatgacgtcgaatcgcgcctggtgacgcacttccgtaaccgctggaaactcgcgcatggcccatttgcgcgcgaaaacctgcccggcgtcaaggcccgccagtggaccctgctggtgcaaggggtaaatctgcatgacgccgccgcggcggaactgatgggccgcttccgtttcgtgccggacgcgcgcctggacgacctgatgatcagctacgccaccgacggcggcggcgtgggcccgcatttcgactcctacgacgtgttcctgctgcaagtctcgggccggcgccgctggcgcatttcgtcgcagaccagccttgagctgatcccggacatgccgctgaagatcctcgccgacttcaacgcggaacaggaatgggtgctcgaacccggcgacatgctctacctgccgccgcaatatgcgcacgatggcattgccgaaggcgaatgcatgacctgctcgatcggcttccgcgcgccggcctaccgcgagctggccgggcatttcctggcctggctgtctgaaacggtcgaagacaatgaagacctcggcggccgttatgccgacgccggcgagcgcgccgccacgcggcccgcgcagttacccgccggcatggccaaggcagtcgccgagcggctcaaggcgttgcaatggaatagccagatggtgtccgaattcctcggcagccatctgtcagaacccaaacctggcgttgaatttgcagagatacccgacatgccgttgcgccgttatgcgacactggcggcccgccatggtgtggtactgccatcagcatcgattgcgctttacgaccgcgcgaatttcttcctcaatggagaagcctacgagccgccggccgaactgatgcaatggctgaaaaagttggccgattatcggcagcttagtagcgaagatgttgcggcttgcgcggacctacccgatctgatggaaactttccatcactggacgctggaaggatggctgcaattgggcccgcggctgtaataatacgtaacattgcgaatcagtaaatttcggcgctacacaagccgggaaaacgcggatataattgttggctggctagtactgtggaccattgcatttatcgggacccgggagggcctctattttgcagttcaagagcgataattaccggtaattattcatcgcctgttttccgttattacaagttaaaggacgaacaatgaagaagtctctcctgatcgcatcgctgctggccgctgttgctctcgccgcttgcggcaagaaggaagaagctgccgctccggccgctgacacggctgctccggctgctgccgctccggccgctgaagcttcggctcccgctgctgaagccccggccgctccggctgctgctgctccggctgctgacgcttcggctccggctgctgacgcttcggctccggctgccaagcagtaatcggttcctgaccgatgaaaaaaccggccttcgggccggtttttttatttgggcgctgctaccgcactgcgccctgccgaatccacgcatccctcaggcgcgcaccgcctgccagtccaggccctcgtcctggtctgccaccagcacctcggacggcaacgcacccaatgccattgccagcgcccccgttgccagctcacgcgtattgttctgcttgctgaggtgggccgcgaccacgcggttcaggccggcatgggcaacttgcgccaggatactggccgccacttcattggccaggtggccgaagtccccgccgatgcgccgcttcagcgaagccggatagaccgaattgcgcagcatctcgcggtcatggttgcattccagcaccagcgcatccacgcctgccaggcgcgccgtcacgtaaggcgtctccatgcctgcatcggtcaacacacccagccttgcctgcccgtccgacaagacgaactgcagcggctcgcgcgcatcgtgcggcacggtgtacggcagcacctgcagtccgccgatggcaaaggcatggtcggcgccgcagacgcgcacgtcggccgcatcggcgccgcgcaggtgcgaggtcgccagccaggtgccgtggctggtatacaccgccaggcggtggcgggcggcaaaggcgtaggccgagccgacgtggtcgccatgctcgtgcgtcaccagcacggcgtcgagctggtccggcgcgacgcccaggcgctccaggcgccgcgcggtctcgcggatgccgaagccgcagtcgagcagcacgcgcgtggtggtggtgtcttcgcgggattcgatcagcagcgagttgccctcgctgccgctgccgaggaaggcgaagcgcatcatggccgcgccctccccgccagacaccggccaggacggccggctggcatgccagcagtcatgcgccggctcagtgcagttgctcgtcgatcagcgacaggatgcgcttgccgatttcgccgttctcaggctggccggcatcgttgagcaccgtcaccagcgtgccgctgcccgtgcccttgagcgacacgcgatacttcttggcggtcttggaatcttccggcttggtgaacagcttggagaagaagccacggctgtcggcaacggtgcgcgggtcgacatagcgcacgtagtacaggccctggccgcggtcgcggtcttcaaccgtgaagttcacgcggtccagcgacaggccgaccgagcgccaggcgcggtcgaacggttcgggcagctgcagcgccggagcgccgttgacctgggacaggtacgacttggccggcgcggcgccatcggcaccagcagcagcgccagcagcggcggccgtgcccgcagcggctgcggcattgcccgccgccgccgggttcttggccatgcggtcggcttgttccttctgcacgcccaggcgctgggccaggcgcgacaggaattcggcttccagctcaggatcggccggacgcggggtccagaccgtgctcgacttgtcgatgccggtcagctgctcctgcgcaccgcggtggctgatgaagacctccagcgtgccgttctgcgaacgctcgacgcgggtgcggaacttgtcgcgctccgaggtcgagtacaggccgtcgaagaccttgccaatggtgttgcggatgatgtcctgcgggatcttggcgcggttctcggcccagtcggtttccatgatgccggtctcgggcgagtcctgcaccagcaggaaaccgctttcctgccagaagccgcgcagctgctgccacagctggtcgccgcgcatgccgttgctgatcaccagccagcgctggttgccgtcgcgctccatgcggataccctgggcggagggcagcacgttctcgctcggggactgctcgcgcaccttggtggcctggctgtacgtcgacagcgtcgaggtgccgttcgcatcgggcaccgaatagcggcgatcgccctccagcttggtcaggtcgggcgggatatccagcgtaggcgtgcgcttcgaggccgacgacttgtagtcgatcttgtccggctgcatcgcttcgttgatgctgctgcagccggtgatcacgccagcggcgagcacgggcacaaccagggcggcgcggcggacttgcgtcgcgccgcggcggttaagcttcagtttcattgacacgcaatcctagtaggtggtgcgacagcaggacgccgcgaaagatcaggccagcaggccggcggcggccagtgccttgcgtacatagtcgtggttggcctcggatagaggggtcagcggcaggcggataccgccttccatcctgcccatctgctggagcgcccacttgaccgggatcgggttggcctcgatgaacatggccttgttcagcccgatcagctccatgtgcaggcggcgcgcggtgacgacgtcgcccttgagcgccgcgacgcacatctcgtgcatcttgcgcggtgccacgttggcggtgaccgagatattaccgtggccgcccagcaggatcagcgcaaccgcggtggggtcatcgccgctgtagatggcaaagccttccggcgcgtccttgatcagctgcgcggcgcggtcgatattgcccgtcgcttccttgacgccgacgatgcccggcacctgcgccaggcgcaggatggtctcgctgttcatgtccgcgaccgtacggcccggcacgttgtacagcagcaccggcagctccaccgcttcggcgatggtgcggaaatgccggtacatgccttcctgggtcggcttgttgtagtacggcacgacctgcagcgacgcatcggcgcccaccttcttggcgaaggcggtcagctcgatggcctccttggtggagttgccgccggtgcccgcgatgatcgggatgcgcttgccggcctgttccacggcaacgcggatcagttcgcagtgctcctcgacggaaaccgtcggggactcgccggtggtgcccacgatcacgatgccgtcggtgccttcggccacgtgccagtcgaccagtgcgcgcagggccgggaagtccaggctgccgtcttcatgcatcggggtaacgatggcgacaatgctgccggtaatctgtgtcataacgttaaggaattcgggatgcgaataaggggattgtaccggaaccgcaggccgcctcgaccgccgcccggacaggggttgataccaactgtttcaacgtgtgcagcggcattctcgccgacagcgccgtgcctggctcaggcgtcgagccggtagcgtgccggcgcgggcgcatcggcgccgccagccgcctcgcgcaccgcacatatccgctgcacgaaggctgttttcggcacttcgaccaggccatcctcataggcgactacgcgcaggccatgctggcgcgccacttcgagcaattcgcccggccgcagcaggaaatccggccgcgacggcttgccgacggtttcattgcccgcggcaaaggtttcataaatccacatgccgccgggcgccagtgccgccgccaggtgcggccacagcggccggtgcaggtagttggtgacgacgatggcgtcgaacggcgcctcgccggccagcggccaggcgccctgctccaggtcggccacccggccggtcacgccggccggcaggccggcgatggcctcgccgtcgcggtcgacggccagcaccgtgtagccgcgtgccgccagccaggcggcatggcggccgctgccgcaggccaggtccagcacccgcgcgccggggcgcagcaggcgggcccagcgggcaacccagggggatggcgccgaaagcccggcatgcgatagcgtcatggcgttcccctgcacgtcaatgcagcagcatcacgatcgggcgcagcatcagctcgatcagcgacatcagcacattgaccaccggcgtcatccagatcgtggtgatcacgcccgcggccaccagcgccagcaccacgaagatgccgtacggctcgatgcgcgacaccgcgcgggcaatgccctgcggcagcagcgcggtcagcacgcggccgccgtccagcggcggcaccgggaacaggttgaaggccgccaccaccaggttgacgcgcacgcccgccagcgccatctcgccgaaaaacggctcgcgcacgccgccccaggtcaggccgatggccagcagcacccagacgaaggcctgcaccacattgctggccggcccggccagcgccacccacatgccgtgccagcgcgggttgcgcaggcgctcgaacgccaccggcaccggcttggcatagccgaacacgaactggccgctggtcatgatgtagagcagcagcggcaccgcgatggtgccgatcggatcgatatggcggatcgggttcaggctgacgcgcccgagcgcataggccgtgtcgtcgccgaaaagcttggccacgtagccatgcgaggcctcatgcagcgtgatggcgaacagcaccggcagggcatagaccgcgaaggtctggataagggaggaatccatggcccctattgtaacggcccggcgccgcccaggcgcacgctcgtgcacccgccaggcggggtggcagcgcccggggaagtcagagcccgaagcgcccgacgtcgccgcggcccgcgcggatcagctcgggctcgccgccggtcaggtcgatcaccgtggtcggctgcgccggcgccgggccgccgcacaccaccagatcaagctgcttctcgagccgcgcgcggatttccgccgggtcgttgagcggctcttcgtcgcccggcatctgcagcgtggccgagatcagcggctcgccggtctcgcccagcagcgccagcggaatcgcgtgttcaggcacgcgcacgccgatggtcttgcgcgccgggtgcgacagccgccgcggcacctccttggtcgcctccaggatgaacacgtacgggcccggcgtggcgcccttgagccagcggtactgccggttgtcgacgcgcgcaaagttgccgagctcggacaggtcgcggcacatcagcgtcaggtggtggcggtcatcgatgccgcgcagccggcgcaggcgctcgacggcggccttgtcgtcgagccggcaggccagcgcatagctggaatcggtcggcagcgcaatcaggccgcccttctgcaggatctgggcggcctgcttgaccaggcgcgactgcggattgagcggatggatctcgaagtactgtgacatggaccagggtggcggattcggacagatcggagcggaatctggggggtaccccggccaggccgggcttgcacctaccagtcgcgccagaccggcgtcaccgtcgacggcagcggcggcagcttgcccagctcaacgcgcccttcgccagggccgtggaagtccgagccacgcgaggccagcagcccgtagtggcgggccaccgcggcatagcggcggtactggtcgggcgtgtggctgccagtcacgacctcgacggcgccaccgcccagggcggtgaattcatcgaacagcgcgtcgtgctgagtatcggtgtaattgtagcggcccgggtgcgccatcacggcgatgccgccggcggcgcggatccagccgactgcgtcggccaggctggcccagcggtggccgacatagccggggcggccttccgacaggtactcgctgaagacctcgcccacggtggcgcaacggccctggtcgaccagccagcgcgcaaagtgcgtgcgcgagatcaggtccgggttgcccacgtgctgcagcgccccttcataggcgcctgtgatgcccacttttgccagcgcctcggcaatatcgcgcgcgcggcgcgcgcggcccgagcgggtatcggtcaggccgtcgatcagttccgggcagtgcgggtcgatctgcaggccgacgatatgcacggtctgcccggcccaggtcaccgagatctccacgcccggcacatagcgcatgccgaattcctcggccgcggcacgcgcctcggcctgcccgcccagttcgtcgtggtcggtcagggcccagaacgcgacacccgcgtcgcgggcgatttccgcgatggcgcgcggcgccagcgtgccgtcggacacggtggaatggcaatgcaggtcggcattgatggcgtgggcgttttgcatggggccattctactcccgtcgtcccctccatgcgtgacgccggcgccccctggaaagccatgccaaagccctgccggcaacgctggcgtgggcggaaacgggcgatgtgcggggtatagtcgggccttgcaccgtctttttgcgggcacctggcgtgcccgccatgcccaatgtccaccgctacccctctcgcaccaacccccgtcaccaccaccgatgtcctgatcgtgggcgccggcccggtcgggctctttgccgcgttccaggccggcgtgctcggcctcagatgcgagctgatcgatgtgctcgaccgtgccggcggccagtgcaccgagctctatcccgaaaaaccgatctacgacatccccgccgtgccgggctgcctggcgcaagacctggttgaccggttgctggagcaatgcgcgccgttcgctttcccgatgcacttcggccagcgcgcggagagcctgtccgaaatcccgcggcagccggcacctgacgggcatgccgcccatgagcgcctgctggtcaccactgacggcggcaagcgcttcgatgtctctgcggtgctgatctgcgccggcgcgggcgcgtttgcgccgcagcgtgtatcgctgccggaagcgccggcactggaaggccgccacgtgcactacgccgtgcgtgatgtgtcgcgctttgccggcaagcgcgtggtggtggccggcggcggcgactcggcgctggactgggcgctcgcgctgcgcaaggtggccgcgcgcgtgactctgctgcaccggcgcgaaggcttccgcgcggccgacggcaccgtcgcggaaatgcgcgaggcagtggcggccggcgagatggatttcgtggtcggcatgctcggcgccctgcgcaccgaaggccaggacggcccgctgaccgaggtcgaggtgcgcacccgcgacggcagcacggtgctgcccgccgatgaactggtggcgctgtacggcctggtgtccgagccgggcccgatcgcgcagtgggacatggacatgcgcgccggccgcatcctggtcgacaccaccacttatgaaagctcgcgccgcggcatctttgccgcgggcgatatcgcctactacaccaacaagcagaagctgatcctgtcaggcttccacgaggccgcgctggcgttgcgccgcgcctaccactacgccttcccggaaaaggcgctggtgcacgtgcacaccagcaacaatgccgcgctgaaggaaaagctgacgcacgcctgagcggcggcgccagcgctcacaccgcgctacagaacgattccaccagctccgccaccgccgcgggctggtcgtgatgcagcatgtggccggcatcatcgaccacggcttcacggaagtcgcggaaggcgcggaagcgctccttgaattcgtcgatggcctgcttgtgggcgatattgcgcagcgtttcagaatcgcgcgcttccacatgcagcactggcgcgctgacctgctcccagatcgccatcacctcatcgagccggtacagcatcgggttgaccagcttgtgcgccggatctcccaggatctcccagcggccctccgcattgcagcgcgaccagtgcgcggccaggaaggcggcacggtcgtcgggcaagcgcgggttggtcttctgcagccgggcggcaacgccgtccacgctgtcatacgtcttcagcgccgagccggtgcgcagttcgtcgagccagcgcgcatagcgcttcggcgcatgcaagggccgcgtcgccgtcataccgaagccctccaggtccaccacgcggcgcacgcgctgcgggcggatgccggcatacaggcagatcacgttggcgcccatgctgtggccgaccaggtcgacctggccgtcgggctcatagtggtcgagcaaggcctccaggtcggcgatatagtcggcgaaccagtacgactgcgtgcccgggtagcgcgtgggccagtcgctctcgccaaacccgcgccagtccggcgcaatcacatgccagtcgccgcgcaggtggtcgaccaagaactggaacgacgcggacacgtccatccagccatgcagcatgaacagcttgcgcgcgccgggctggccccagtggcgcacgtggtagcgcagtccgcgcaacgtgataaattcagaccgcgaggtttccttgattgtcattgtctccacccttgcgcgcgggtcttcctgccgccgggcgcggcgccacgggggctggcgagggaagcccacgcaaaatagaacgatcgttcgcttgcgcgcattatagcggccgccgccattccgggggccccgtggccgcgcgagccggacctaccggagaccttggatggccgcagctgcgttgccggcaagccggcgcgacgactatcgcgccctgtatgaatccttccgctgggaaatccccccgcatttcaatatcgccgaggcctgctgcgggcgctgggcgcgcgacccggccacgatggaccgcatcgcggtctataccgagcatgaggacggccgccgcaacgcgcatacctttgcccatatccaggccgaagccaaccgcctgtcggcggcgctgcgcgcactgggcgtggcgcgcggcgaccgcgtggcaatcgtgatgccgcagcggatcgagaccgtgatcgcgcatatggcgatctaccagctcggcgccatcgccatgccgctgtcgatgctgttcgggcccgaggcgctggcctaccgtatcgcacacagcgaagccaatgtggcgatcgcggacgagacttccatcgacaatgtgctggccgcgcgcccggaatgcccgacgctggccaccgtgattgccgccggcggcgcgcatggccgcggcgaccacgactgggacgtgctgctggccgcgcagctgccgacttttgtcgccgagcagaccaaggccgacgaggccgcggtgctgatctacaccagcggcaccaccggcccgcccaagggcgcgctgatcccgcaccgcgcgctgatcggcaacctgaccggctttgtctgctcgcagaactggtatccgcaggacgacgacgtgttctggagcccggccgactgggcctggaccggcggcctgtgggatgcgctgatgccggcgctgtatttcggcaagcccatcgtcggctaccagggccgcttctccgccgagcgcgccttcgagctgctggagcgctacgccgtcaccaacaccttcctgttcccgaccgcgctcaagcagatgatgaaggcctgccccgagccgcggcagcgctacgacatcaggctgcgtgcgctgatgagcgccggcgaggccgtgggcgagaccgtgttcggctggtgccgcgatgcgctgggcgtgatcgtcaacgagatgttcggccagaccgagatcaactacatcgtcggcaactgcaccgcgcagaacgacgacaagcagctgggctggccggcacgaccgggctcgatggggcgtccctatccgggccaccgcgtgcaggtgatcgacgacgaaggccagccctgcgcgccgggcgaggacggcgaggtcgcggtatgcgccaccgacagcgccgggcatccggacccggtgttcttcctcggctactggaagaacgaagccgccaccgcgggcaagtacgccgagcgcgacggcctgcgctggtgccgcaccggcgacctggcgcgcgtcgatgccgatggctacctgtggtaccaggggcgtgccgacgatgtgttcaagtcctcgggctaccgcatcgggccgagcgagatcgagaactgcctgctcaagcatccggcggtgtccaactgcgccgtggtgccctcgcccgaccccgagcgcggcgccgtggtcaaggccttcgtggtgctgacaccgtcggtggcgcgctcgttcgacggcgacgcggcgctggtcacggagctgcaggcgcatgtgcgcggccagctggcgccgtatgaatacccgaaggcgatcgaattcatcgaccagctgccgatgaccaccaccggcaagatccagcggcgcgtgctgcgcttgctggaggaagcgcgcgcgggcaagcgcgcctaggcaggaaagacccgctcgcagaggaaatcgaccagcgccctcaccttgggcgagggatgcctgctcgccggccagagcacgtgaaaggccttggctggccccacatggccagccagtacctggcacaggctgccatcggcgagctgctcgcggatggcgaaatccggcaggcaggcaatgcccaggccgcgcagcgcaaaacacaggcgcgtctcgatgttgttgcagatcatcgatgtcggcagcgccagctcgggctcgcccggcgcgcgccgcagcggccaggcctcgagcttgccggtatgcgggaaacggtaatgcaggcaggcatggccggtcaggtcggcaggcagcttcggcgtgccacgctgcgcgaggtagtcgggcgatgccaccagcatcgcctggaacgcacccagcctgcgtgccgacaggcgcgagtcggcgggctcgccggtgcggaccaccgcatcgaagccctcctcgatgacatcgaccagctggtcggtgaaatccaggtccagctcgatgtccggatacgcgcgcatgaagtcgcccagcacgggcaagaccagtgaactgaccagcggcaggctcacccgcaggcggccgcgcggtgccgcggtggcttcggccagctccagctccgccgcttcgatctcggcgagcacgcggcggctgcgctccaggaacagcgtgccttcggcggtcagcgtcacgctgcgcgtgctgcggtggaacagccgtacgccgagcctttcttccagccgcgccacgctcttgccgacggcggaggccgacaccccaagcaagcgccccgccgcgacaaaactgcgggtctcggccacctgcacaaacactgcgaagccactgaggctgtccatgatgcccccgattgcggacacaaagttccggagaaaaaggaactgtagcccactttttctttaatggccgggtccttatcgtgagcgggtcgttcattgaacaaggattcgctgtgtccctccccacgattgcaccgcccccgggcgtgtcccctgcattccccgcgcccgtgagtgcgcgcatcgacgccgtggtccggcaggcgctggagcaacggcgactggtcggcgccgtcgtgctggtcagccgtgacggcgaactggtccaccggcaggcggcaggcctggccgatcgggaaagcggacagccgatgcgcatggatgcggtcttccggctggcttcggtaagcaagccgatcgtctccgtggcggcactggcgctggtcgcacaaggccggctcgagcttgaccagggtatcgaccgctggctgcctgaattccgcccgcgcctggccgatggccgaccggcacgtatcacggcgcggcaactgctcagccataccgcggggctgggctatcgcttcttcgagtccggcgaagacggaccctatgcccgcgccggcgtctccgacggcatggacgacgccaccatcagcctggcggagaacctgcggcgcatcgccagcgtgcccttgctgtacgaaccgggtaccgcgtggggctactcgctcgcgaccgacgtgctgggcgcgctgatcgagcgcgtccatggcacgccgctggacaccgcagtgcggcagctggtgaccggcccgctgggcatggccgacaccggcttcgtggcacacgacgtgcaccgcgtgccgaccccgtacgtgaacgacagcccgcacccgcaccgcctgcgcgaaggcgaaaccgtgcccgtgctcgaaggcacggttggcattccctacagtcccgcacgcatcttcaatgcgcgggccttcccctccggcggggcgggcatggcgggcacggcgcaagacttcctgtgcctgctggagagcttgcgccagggcggcggcgcgttgctgccatccgccctggtcgaggacatggcgctcgaccagaccggcggcctggacctgcccgatgcgccgggaaccggcttcgggctgggcttctcggtgctgcgcgatccgcgccgggcgggctcgccggaagccgccggcacctggcgctggggcggggcctacggccacgcctggttcgtcgaccgcagccaggggctgagcgtggtggcgttcaccaacacgctgtacgagggcatgtccggccgctttgtcaccgacctgcgcgacgcggtctacggtgtcgcccccacagccgcgtaaccatccaagcaacacatcagtccttatccaggcgccaacatgaccacagccaccaacacgcttgcgaacgatgcacagccggacacgcggcctgcgcggctaccgcttccggcactgcttgcgcttgctgtcgcaggcttcatcaccgtcctgaccgaggccttgccggcggggctgctgccgcagatcggcgcgggccttgccatctccgagccgcttgccggccagttcgtcaccatctacgccttcggttcactggtggccgccatgccgctgacggcggctacgcaagggctgcggcggcggccgctgctgctgcttgccatcgcgggctttgccgtcgccaacgccgtgacgggctggtccggcagctatgtcctgacgatggcggcgcgcttccttgcgggggtctcggccggactgctgtgggcgctgctggctggctatgccgcgcgcatggttcccgatcacctcaagggtcgtgccattgctgtcgcgatggttggcatccccctggccttgtcgctgggcgtgccatccgggaccttcctcggtgcgttcatgggctggcgcgcgtgcttcggcatcatcagcgtgctgacgctgggactgattgcctgggtgctggcgagcgtgccggattttgccggccagcccgccggccagcggctgccgatcgcgcgcgtgttcaccgtgccgggcgtgcgtccggtgctgttcgtgacgctcgccttcgtgctggcgcacaacatcctctacacctatatcgcgccgttcctgcgagccggcaacgccggggcacggcttgacctggtcctgttcgtgttcggcgtggcctcgctcgccggcatctggatcaccggcgtgctgatcgaccagtggctgcgggcgctgacgctggccagcacgctgctgttcgggcttgcggtgctggcgcttggggccgggggcgggcacccggccgtggtctatgccgcggccgcgatctggggcctgggcttcggcggcgtctcaacgctgttccagacggcgctggcgaagaccgccggcaaatccgcggacgtggcccagtcgatgctggtcacggcctggaatattgccatcgccggcggcggcgtcatcggcgggctgctgctcgatggcgtcggcatcggcgcattcccgcccgtgctggctgccctgctcgccgcaacctggctggtggtctggtcggcgcgcaggcatggctttcccgcgcgcggctgaggtgcgggacggcaagcctaaccggccgatgcctccagccaggccagttcgtcttcatcgaagcccgcagcgcgccgcgcctcaagattgaatggcccgcgcagcttcggcgcgcggtactgcccggccagctgcgcgtaggtggcaacgggctccaggccgcgctgcgcgcacagccagcggtaccagtggttgccgatggcgacgtggccgacctcgtcgcgcaggatgatgtcgatgatggccgcggcggcgtggtcgcctgcgccggccagcctggcgcgcaccggcggcgacgcatcgagcccgcgcgcctccagcgtgcgcggcaccagcgccatgcgcgcaagcacgtcgccggcggtcttgtcggtcatctcccacaggctgttgtgggcagggaagtcgccgtaggccgcgcccagcgtgccaaggtggtcggccagcagcgagaagtggtacgcctcttcatcggccacgcgcagccagtcgcggtagtagccgggcggcatgccggcgaagcgccaggccgcgtccagtgccaggttgatggcattgaactcgatatggcacagcgcatggatcatcgccgcgcgcccggccggggtatgcagcgagcggcgccgctcgacgtcctgcggcgccaccagcggcggccgcgcggggcggccggggatggcctggccggcatcggcctggatcgcctcgccggcggcaagcgcctcgtccggcaatgtcgtcacatggcggtaaagtgcccgcgccgccacggacttttcccgaggatccgtcatgcacaacaccgccagcgcctggtggcgcggcgaaagtgactgttcgggcaaggcggcggcgggtgttttttctggcatgagcgtaaaatccgggtctgccgccattgtagggcctggccggtgcccgactgccgggcaagccgcgcagtcgccgtggcgccgcgcgcccgcactccaccctggccctttaaagtccggcggcaacccccacttcaacaaaagcctttcgtgcaggagaccccatggcgctttaccagctcggcgacgtcaagcccaatatcgacagcgatgcctacgtggcccccgaagccaccgtcatcggcaacgtgaccctcaagtcccgcgccagcgcctggcccggtgtcgtgatccgcggcgacaacgaaccgatcgtggtgggcgaggacaccaacatccaggaaggctcggtgctgcataccgacccgggctgcccgctgaccctgggcgacaaggtctcgatcggccaccaggccatgctgcatggctgcaccgtaggcgaaggctcgctcatcgggatccaggccgtggtgctgaaccgcgccgtgatcggcaaggaatgcctggtcggcgccggtgccgtggtgaccgagggcaaggtcttcccggaccgctcgctgatcctgggcgcgccggccaaggtggtgcgccagctgaccgacgccgacgtcgccaacctgtaccgcaacgccgagacctacgccacccggcaggccatgtacaagcaacagctcaagcggatcggctgacgaccgcggcggcacttaccgaatcatcgacagattattgtgaccgataccaccacccccgacaccctgcagaaattcctgttcgacgcggctcccgtgcgcggcgagctggtgcgcatggaagccacctggcaagaagtgctgggccgccacagctaccccgcaccggtgcgccggctgctgggcgagatgatggccgccgcggcgctgctgtcggccaacctgaagttcaacggggcgctggtgatgcagctgcacggcgacggcccggtgcgcatgctggtggtggaatgcctgtccgacctgtcgatgcgcgccaccgccaagctggccgagggcgcgcacatcgccgacgacgccacgctggcgcagatggtcaacgcccacggccacggccgctttgccatcacgctggatccgaaggacaagctgccgggccagcaggcgtaccagggcatcgtgccgctggccgacgcgcatggcccgctgggctcgatcagcgccgtgctcgagcactacatgcaggcgtccgagcagctcgacacgcgcctgtggctggcggcggacgaccacgtcgccgccggcatgctgctgcagaagctgccggcctacggcggcaccgcggaagtcggcgagaccggcgcgccgctggccagccatgcccgcgcgcaggacctggacacctgggaccgcgccgtgcagctgggcgccacgctcaaggccgacgaactgctggccgagacccccgacaccctgctgcgccgcctgttctgggaagacctgcaggccgccggcctgcgcgtgtttgagccgctgacgccgcatttccattgctcctgctcgcgccccaaggtggccggcatgctgcagtcgctgggccaggaagagatcgaaggcatcatcgccgagcgcggccaggtcgagatccactgcgacttctgcggcctgcgctatgagtttgatccggtcgactgcgcccagctgttctcggccacccatatcgccaccggcgccggtgccggcgcgcaccagcaccactgagcggcaggcgcggggcggcatggcggaaacaaccgccttgccgtcctgtccaacggctgtacgatggcagcatccagctgccccaagcaagcctgagtacagccatgtccgcccgagccaccccctccctgcctgaatctcccgccatcgtgccggccgtgctgcgctgccttgccgcctgcgccgcgaccggcgcactgctgctggccgcaggctgcgcagagctgccgcgcgacgtcaacggctcgccgcccacggcgcggctggcgcccaacgccatcccgccagcgccgctgaccgccgacgacaagcagaagctcgacacgctgaaccagcagatactgcgcgagcaggccgccgcgatcgcgctcgaccagcaggccgcggccgcgcgcgcggcttatggctatccgaacaccagctggaacctgtattacgggggatggggtggtggccactggggcggcggcgtcagcgtcggcatgcccggctggggctggggcggttatccgtacggctggtggtgacaggcaggcggcgggctggatgcaagcccaccgacagcgagaggcaaggcgccccttagtggccgcctcttccggcgaccgaattcgccggcggcggcaacggcggcgtcgcgctgaccttgggcgccggcgcgacaaactgcacgaagacctcgccttccctcaccatgcccaactcatagcgggcacgttcctcgatcgcgccggtgccgtcctgcaggtcggcgacttccccttccagcttggcgttgcgcagcttgagcgtctggttgcgggtgccctgctcggtcagttgccggttcaggtcccacacgcgcagccagccgcccttgcccagccagagcgggtactggatggcaagcagcagcacaaacaacagcagcgagatcaggcgcatgaaagatggcggacaggaaattccgcacaatgatctgcgaactcagcccggaaggcaattgccaggcagatttcgatacaaaaacggcggcggccagggaatcccggccgccgccattccatccgcttgctgccgctcccgcgcaagcgggaacggcagggcaaggtgtcagcgcaggttgtagaacgcgcccttgcccgggtagctggcgatatcgccgaggtcttcctcgatgcgcagcagctggttgtacttggccatgcggtccgagcgcgacagcgagccggtcttgatctggccggcgttggtgcccacggcgatatcggcaatggtgctgtcttcggtctcgcccgagcggtgcgagatcacggcggtgtagccggcgcgcttggccatctcgatggcggcgaaggtttcggtcagcgtgccgatctggttgatcttgatcaggatcgagttgccgatgcccttctcgatgccttccttcaggatcttggtgttggtgacgaacaggtcgtcgcccaccagctgcacgcgcgtgcccagcttctcggtcagcgtcttccagccgtcccagtcgccttcggccatgccgtcctcgatcgacacgatcgggaacttgtcgcacaggttggccaggtagtcggcgaactgggtcgacgacagcttcaggccttcgccttccagctggtacacgccttcgccttcgtggtagaactcgctggcggcgcagtccagcgccagcagcacgtcttcaccggcacggtagccggccttctcgatggcctgcaccacagtgttcaggcattcctcgttggacgagaagttgggggcgaagccgccctcgtcgccgaccgcggtggacatgcccttgtcggccaggatcttcttcagcgcgtggaagatctcggcgccgcagcgcagggcttcgcggaagctggtctgcgacaccggcatgatcatgaattcctggatgtccaggctgttgttggcgtgcgcgccgccgttgacgatgttcatcatcggcaccggcagttgcatcgcgcccgaaccgccgaagtagcggtacagcggcaggccggcttcttcagcggcggccttggcaacggccatcgacaccgccagcatggcgttggcgcccagccggcccttgttctcggtgccgtcgaggtcgatcagggtgcggtccaggaaggcctgctcggaggcatccaggcccatgatggcttcggagatttcagtgttgatgtgctcgacggccttcagcacgcccttgcccaggtaacgtgacttgtcgccgtcacgcagttcgatggcttcgcgcgaaccggtcgaggcgcccgacggcactgccgcacggcccatcacgccggattccagcagcacgtcgcattcgacggtggggttgccgcgcgagtcgagaacctcgcgaccgatgatatctacgattgcactcatgaattcctctctgactgttgattcttgctgctgctgattacttcaacctgtgcccgtgtcaggcgcatgtcaaactgcccggcaaccctcaggcagcgccttccaccacgatcatgttcatctttgccgcgtgctcgcgcgccttgcgggcggcgcgataggcttcgccgtcatggaacgacctggcggcttcatagctggggaatttcagcaccacgacgcgggtcggcgcccactcgccctccagcggctcggtcttgccgccgcgcaccaacacttcggcgccatgaatctgcatggccttgctcgaaagcactttgtattcttcgtactgctgggggtcggtcacgtcgacgtaggcgatgatatagcccgcggccatggaatatctcccgattttttgtattgtctttcgatatggtttgtcaccaccggcattgcggtggtgacaagaccgggcctgctcaggcgcaggccggccagccgaagttgtcttccaggaaaccggcgcgcttgaccagcgtgtccagttccttgagcacggccagcagttccttcatgcgcgacagcggcaccgcgttggggccatcggacatggccttgctcgggtccgggtgcgtttccatgaacaggcccgccacgccggtggcgacggcggcgcgcgacagcaccggcacgaactcgcgctggccgcccgagctggtgccctggccgcccggcagctgcaccgagtgggtggcgtcgaacaccaccggggcaccggtctcgcgcatgatcgccagcgagcgcatgtcggacaccaggttgttgtagccgaacgagacaccacgctcgcaggccatgaagacatcgtcaggcagaccggcttcgcgcgcggcatcgcgcgccttgtcgatcacgttcttcatgtcatgcggcgccaggaactggcccttcttgatgttcaccggcttgccgctctgggcgcaggcacggatgaaatcagtctggcggcacaggaaggccggcgtctgcagcacgtccaccacggcagcgacgggcttgatctcgtcgatctcgtggatgtcggtcagcaccggcacgccgatctcgcgcttgacggtggccaggatctccaggcccttttccatccccaggccgcggaacgacttgccggacgaacggttggccttgtcgaacgacgacttgtaaatgaacgggatgcccagttcggcggtgatggccttgagctcgccggccgtatccagcgccatctgctccgactcgatcacgcacggaccggcgatcaggaagaacggcttgtcgaggccggcctcgaatccacagagtttcatgactgtctctcctgcttgccgccggggcttacgcgcccttgcgctgctggctggccagcgcggcttcgacgtaggccttgaacagcgggtggccgtcacgcggcgtcgaggtgaattccgggtggaactgcacgccgacgaaccaggggtgcatcgactcgggcagctccatcatttccggcaggttctcggtcggcgtgcgcgccgagatcaccatgccggccttttccagcgtcggcacgtagtggttgttgacctcgtagcggtgacggtggcgttcattgacctcggcgccgtagatcgtcgctgccttggtgccttccttgaccggcacgcgctgggcgcccaggcgcatggtgccgcccaggtcggaatcggccgagcgctgctcgaccttgccttcgcggtccacccactcggtgatcagcgcgaccacggggtgttcggtttccaggttgaactcggtcgagttggcatcggtcatgccggccaggtggcgggcaaactcgatcacggccagctgcatgcccaggcagatgcccaggtacgggatcttgttctcgcgggcgtactggatcgcgcggatcttgccttccgtgccgcgcttgccgaagccgcccggcaccaggatggcgtcgagcggggccagcacttcgaggtggcccgattccagttcctcggagtcgatgtactcgatgttgacgcgcgtggcggtgtgcatgccggcgtggcgcagggcctcgatcagcgacttgtacgactcggtcaggtcgacgtacttgccgaccatgccgatggtgatctcgtgctcgggattttcctgggcgttgaccagcttctgccacatcgacaggtcggcgggcttgggatccaggcgcagttcctcgcagatcaggcggtccaggccctgctcgttgagcatctgcgggatcttgtagatgctgtccgcatcccacaccgaaatcacggcgtcttgcgggatattggcgaacaacgagatcttggcgcgctcgtcgtccgggatcgggcggtcggcgcggcacagcagcgcggtcggcgagatgccgatttcacgcagcttctgcaccgagtgctgggtcggcttggtcttgagctcgccagcgctggcaatgaacggcaccagcgtcaggtgcacgaaggcgcagtggttgcggcccatgcgcaggctcatctggcgcgcggcttccaggaacggcagcgattcgatgtcacccacggtgccgccgatttccaccagcgccacgtcggccttgccgtcgtgcgacgccgcggcgcccctttcgacaaaggcctggatctcgttggtgatatgcgggatcacctgcacggtcttgcccaggtattcgccgcggcgctccttgcggatcaccgattcgtagatctggcccgtggtgaagttgttcgacttgcgcatcttggccgagacgaaacgctcgtagtggccgagatcgaggtcggtttcagcaccgtcttccgtgacaaacacctcgccatgctggaaggggctcatcgtgccgggatcgacgttgatgtagggatctagcttgaggagggtgactttgaggccgcgcgactcaagaatggccgcgagcgaggcagcagcgatgcccttgccgagagaagagacgacgccaccggtgacgaagacgaatttggtcataaaccgagcttgccggggaaatcgggattatacatgagagcccgattcccgccgacccggaaattgtgacagcacccctcctcggcggggctgcaacaggccttcccggtgcgttgcggcgcatgcgccgcaccccgcctcagcgcccctcgcggcgcatcgcgccgatcaggtcgcgcaccagctgcgccgtctcctgcggccgctccatcgggtacaggtggccgccctcgataaagcgcagattcgggccgaccagcttgcgggtggcacccagcccacactggcgcacctcgcgcgaacgcgtgccggcgacaaagccgaccggcaccggcgcgccgcgcgccaccttgcgccccaggctggtcggcagcgtgcggtagatccagtattcgacctcgcggtcaaagcgcagccgccgctcgttgtccttgccggtcggctcggtgccgtggatggcgtagtcgcgcagcacctcttggtcccacaccgcgaagttgggcttggcgcggaagtgttcccagaccgcctcggcgtccggccagtgggtgcgccggtttttggtcaccgccgccgggccgggcttttcgtccatgccgaacatctgggcggtcttcagcagcgacgcgcgccagccggcaatgatcggcgaatccagcatcaccacgccgcgcacgcgctccgggcgccgcagcgccgccatcagcgacaggaagccgcccagcgaatggcccaccagccacaccggctcgtggtactggcggtcaatctcgccgagcagctcctccaccaggtgcggccagccgcgcgtcaccgggaattcaggcttgtgcccgtagcggtccacggcgcggaattcgaagtcgccgtccagttcgccgaacagcttgcggtaggtggtcaccgggaagccgttggcatgggaaaaatgaatgatctcgcgcatcgcttgtttcctcgcccggcctcagtcctgggtacgcgacggattgcgcttggcgcgcaccggctggccccagcggtcggcctcgccgggacgcgccagcgagaattccgcgggcgcgccgggatcccactcgggattgtggatctcgccgaagacctggcgcaggcgctgcccccaggtgtcgcggatcatgcggaagtaggcgttgcgctcgtcgatgttgacgaagcgcgtcacgcacagcgtatcggcctcatagaccagcaggtccagcggcaggccgaccgagatattcgacttgagcgtcgaatccatcgagatcagcgcgcatttggccccctcggccagcggcagcgacgggtgcaccacgcggtcgatgatgggcttgccgtacttggcctcgccgatctggaagtagcagttctcgggcgtggcctcgacaaaattgccggccgcgtagatgttgaacagccgcacgcgttcaccgcgcacctggccgccgaagatcaggctgacattgaattcgatgccggcatcgcgcagcgcatgcgcatcgcgcttgtgcacctggcgcaccgcctcgccgacgatggaagcggcctcgaacatgtcgcgcgcggtccacagcgagcgcttctcgtcatggttctcggccaggatctggcgcaccgactggctgatcgccaggttgccggcggtcatcagcaccatcacgcggtcgccgggctcttcgaacaccgtcatcttgcgcgacgtggagatggcatctacccccgcattggtgcgggaatcggacaggaataccaggccggcatccagccgcatggctacacagtaagtcatggtcttgttttggtgtgctttgcggcggccggaagtggccagccgatggcctgcatacccgggattctagcgcccgtattgcggcaccgcgccctgtctggaatcaggcacctaatcaggtaaaaagcggcgtgatgctcacatcaacttcaagcgtctcgccggaacccccttccaggatgcccctgactggtgcagccgacgcataatcgcgccccaccgcgaggcgtatatgacgctcgtcggtcaggcagccgtgggtgatgtcgacgctgcaccacacctcgcgcgccgggtccaggcatacgtcggcccaggcatggctggccatctcgatcgcggccggatcgtagaagtatccgctcacatagcgtgccgggataccgagcgcccggcacgccgccaccatcacctgcgcctggtcctggcacacgccgctgcccaggctgaaggcctcggccgccgaggtgccgacgtcagtggtgttgggcttgtagcgcacccgctccgcaatcccctgggccaacgccagcagcgccggaatctcgtgcccggccgccaggaacggcgcggcaaacgcctgcatctccggcggagccgaggtcagtggcgtgctgccgaggaagtacagcggcgacacccgggactcgccggggggcggagcgtcgcagaacgcatggtggccgtcccggtcgaggtcgccatgcggcggcagcacttccacctcgccgctggcttcgatcgagatggtgccggtcggtccggccaccgtgaagttgtgcacgatattgccgaatccgtcgcgcgccgccgacggattgccaggcgcgaccagttgccagcggtgcaccgtctgcagcgggcccgaacgcggctcgagccgcacttcgtgcacgctgcggcgcaccggctcggcgtagcggtaaacagtatggtggtggatcttgtatttcacggtatcagggcgcggcggcggcacatggaggctgccggcggcccatttcaggcagccagcagcggcacgaggaagtcccggctgatgccattgccgagatcgccgatgcgctccaggaagctggtcaggtacgcgtgcaggccgaccgcgaaaatatcgtcgatgcgcgcgtacttcaggtcggcgtggagtttaccagcctggcgctcggtttccgccgattgctggttgcgcaccgtatgcaggatggccaccacctcgtccatgctcgacaccagcgagcgcggcatgtcgggccgcaggatcagcagctcggccacgcgctgcggcgtaatgaccgcgcgatagaccttgcggtagacctcgaagcccgagaccgagcgcagcaccgcggcccagtgatagaaatcgttctggtcgcggttggcatcgctctcgtcgctgcccgatgcctggaacttgacgtcgaggatccgcgcggtgttgtcggcgcgctccaggaacgtgcccagccgcatgaagtggaaggcatcgtccttgagcatggtgccgaactggaccccgcgcgccaggtgcgagcggaacttgacccattcgaagaacgccgacgggtcctccttcagcacgccgtcggcgatcaggcgctgcacctccagccaggtggtgttgacggtctcccagacctcggtggtcagcgagccgcgcaccgcgcgcgcattctcgcgcgccgcgcgcaggcagctcatgatggacgaggcgttggtcatgtcgcgcaccatgaagtcgatcacatcgtcgcgcgacagcagtccgtacttgtggtcgaagacatcggtcagctccgagatatcgagcatggcccaccagccctgctcggccacctcggccgattgcggcaggagcgaggtctggtagttgacgtcgagcatgcgcgcggtgttctccgcgcgctcggtatagcgggccatccagaacaggtggtcggcggtgcggctcagcatgtgggctctcctggcgtggcggcggtcgccatggcggtcgttgcggcggtcatcatgtggttcgcgttcatcgttccagcacccaggtgtccttggtgccgcccccttgcgaggaattcaccaccagcgagccctcgcgcagcgccacgcgggtcagcccgccaggcaccatgcgcacctccttgcccgacagcacgaacgggcgcaggtcgatatggcgcggcgcgatgcccgactccacataggtcgggcaggtcgacagcgccagcgtcggctgcgcgatgtactgctccgggcgcgccttcaccacttcgcggaaggcatcgatctcggcccgcgtggcggccgggccgaccagcatgccgtagccgccggcgccgtgggtctccttgaccaccagttcttccatatggtccagcacgtactgcaggtcgtccgggcgccggcacatataggtcggcacgttgctgaggatggcctcttcgcccaggtagaagcggatcatgtcgggcacgtacggatagatcgacttgtcgtcggccacgcccgtgccgatggcgttgcagatggtcacgttgccggcgcggtagaccgacagcaagccggccgcgcccagcgaggaatcgtggcggaacaccagcgggtcgaggaagtcgtcgtcgacgcggcggtagatcacgtcgacgcgctgcgggccctgcgtggtgcgcatgaacaggtggtcgtcctcgacgaagagatcgctgccttcgaccagttccacgcccatctgctgcgccaggaaggcatgctcgaagtaggccgagttgtacatgcccggcgtcagcaccaccacggtgggatcggcaatggcctgcggcgacaccccgcgcagcatgtcgagcaacaggtcaggatagtgggccaccggcgccacgcggttgcgcgcgaacaggtccgggaacaaccgcatcatcatcttgcggttttccagcatgtacgacacgcccgagggcacgcgcaggttgtcttccagcacgtagaactcgccctcgccggcgcgcaccacgtcgatgccggccacgtgcgcatagatgtcgtgcggcacgttgacgccgagcatctcgggccggtactgggcgttgttgtagatctggtcgggcgggatcacgccggcgcggatgatgtcctggccgtggtagatatcgtggacaaagcggttgagcgcggccacgcgctggcgcagccctttttccagcagcgcccattcgttcgccgggaagatgcgcgggatcacgtcgaacggaatggtgcgttcggtgccgctgttggcttcatccttgtcgccgtagacggcaaaggtaatgcccacgcgccggaagatcaggtcggcctcggcgcgcttgttgcccatcgtgccttcagactgccgcgccagccagtcagcgaaatgccggtaatgcgggcgcaccgcgccttcaggcaacgcctgccccgcctggataacccattgcgccccgtccgtgcgccagtccagcatctcgtcgaaataccgccccgccatgatggccgttcctccatgtcgcgggcttccggtgctaccgcttcactgcgacttcgtggtcgctaccggctgccctggttttgccctggctttcccgtccccagcccgccgcgcctgcccgttcgggacgctcacggcgatactgtcgagtcactggccctttcagcatacccgtaccggcgaaacccgcaagctggcgggtgccggccggcacggaaagtgaactagcaagatgtctgccagcgcacgcaaaaacggccgccagccaggctggcggccgcttgcgggctgcacgggaacggggccggccggaacggtcggcgaggtcagcaggtcagcgcgccgcgccggcgccctgcggcaccgtggcctgcaggatggtggcgaccagcgcctcgggcgactggcggatgtcgagcaccagcgcgtcgctgggctcttccagcgtatcgaactggctttgcagcaggtcggggttgaagaagtgttccgtgcgcgcggacaggcgcgtgccgatcagcgatgcatcgcccttcatgaagacgaaggtcacgccgccgtcgggcggggtcagccggtcgcggtaggcctggcgcagtgccgagcaggtgaacacatgggtgcggccttcggcccgggccgcgtcgatggcggcgcgcatggccgccagccatggccagcggtcttcgtcggtcagcgggacgccagcgtgcatcttggccttgttggcgtcgctgtggaatgcatcggcgtcatggaagccgcagcccagtcgctgcgccagcaactggccgaccgtggtcttgccgctgccggaaacgcccatcaggatatagatcatgtctgctccgtcggtcttggtatcggatggtgtcgccatccttgtctgtccttgtcggtccagctggacgtccttgcggcggcgcaaagacgtcgggggggcgctgccgccccgcagggaacttcaggggaaaatcggcctcaggcctggctattgtgcgacggtttgcgccgctgcggtacgttggcgcccgcctgcgccggccccaacatccgcctcggacaggtcaagtgcgctgccgccctcttccgcgatgcgcgcgtggcgccggaacaggccgaacaggccgcgccccaggctgaattgcgcgaaatcgtcgtccggcgccgcggccagctcgcgcgccgcgaattcacgttcgtcgcccagccactgcagcgtgccggcaacggcatcgacacggatgcggtcgccgtcgcgcacgcgcgcgagcgcgccgccggccagcgcctcggggccaacgtggatcaccgccggcaccttgcccgacgcgccggacatgcggccgtcggtcaccagcgccaccttgtggccggcgtcctgcagcgcgcccagcaccggggtcaggcggtgcagctcgggcatgccgttggcgttcggcccctggaaacgcaccaccgcgaccaggtcgccggtcagctcgcccgcatcgaaggccgcctgcagcgcctcctgcgcatcgaacacccgcaccggggcttcgaccacgcggtgctccggcgccaccgccgagaccttgatcacgccgcggcccaggttgccctgcatcagccgcaacccgccctcggccgagaaaggctccgcgaccgtcgccagcacctgcgcgtcgccgctgtgcgccgcgccgtcgcgccagcgcagcacgccgtcggccatcaccggctcctgcgcatagcgggccagcccggggccggccacggtctgcacgtcctcatgcagcaggccggcctgcagcagttcgcggatgacgaaaccggcgccgcccgcggcatggaagtggttcacatcggccgagccattcgggtagacgcgcgccagcagcggcgtgatgcgcgacagcaggtcgaaatcgttccagtcgatgacgatgcccgcggcgcgcgccatcgccaccaggtggatggtgtggttggtggagccgccggtcgccagcaggccgaccatggcgttggcaatggcgcgctcgtcgacgatgcgcgccagcggcaggtattcgtcgccgcgcgcgcgcagggcgatcgcgcgttgcgcggccgccgcggtcagcgcatcgcgcaggccgctgtccgggtgcacgaaggccgcgcccggcaggtgcaggcccatgatttccatcaggaactggttgctgttggcggtgccgtagaaggtgcaggtgccggcgccgtggtaggcctggcattcggcttcgagcagcgcatcgcgcccgacctggccggtggcgtagagctggcgcacgcgcgccttctccttgttgggcagcccgctggccatcgggcccgccggcacgaacaccatcggcaggtggccgaactgcagcgcgcccatcagcaggccgggcacgatcttgtcgcacacgcccagcatcagcgccgcatcaaaggtgttgtgcgacagcgccaccgcggtgcccatcgcaatcgcatcgcgcgagaacagcgacagctccatgcccgggttgccctgcgtgatgccgtcgcacatcgccggcacgccgcccgccacctgcgccaccgcgcccaccgcgcgcgcggcctcgcggatcacggcggggtagcgctcgtacggctggtgcgccgacagcatgtcgttgtacgcggtgacgatgcccaggttgggggcatggtcgacgcgcagcttcagcttgtcgttggccggcaatgcggcaaagccgtgcgccaggttggcgcaggacatgccgcgcagcggccccagttcagcctgcgcgcgctcgcagcgggcaaggtaggcggcgcggctggcgcggctgcgcgcgacgatgcgctcggtgacggcaagaagctcggcatggacggcagaaggcatggcggagacgttccttgtgggcttggtggcggcgcggcaatgccgcgccatcgcatgtagattttctacagatcgccgccattataccgagcgcgagcacgccgtcgacccgctcatgcatcacaattgcgcagaaattcccggaatcagggcaaaccccgagggcgggcgacgcaccatttcgggcaagatgcggcgccatccgatgtagaatctctacatatccgcaacccccgacactgcctcccgccgccatgcgcgaccgaatcctagccgtctacgacacgctccgcccttctgaacgccgcctggccgactatgtcgcccggcatggcgccgccgtgatccggctgtcgatgcccgagctggccgagcgcgccggcgtgtcgcagcccaccatcgcgcgcttctgcgcggcgctgggctacgacggcttccgcgaattcaagctgcagttcgcgcagaacgttggcggcggcacgcccttcgtgcaccaggacgtcgcggccgacgaccgccccgcggacatcgccggcaaggtcttcgaccgcaccattgccacgctgatgagcgtgcgcaatgcgctgtcggccgaccagatcgagcatggcatccagctgctcgccggcgcgcgccgcatcgagttctacggctgcggcaactccggcatcgtcgcgctggatatccagcacaagttcttccgcctgggcatgccgacggttgcgtattccgacccgcacgtgttcagcatgtcggccgcgctgctcgcccgtggcgacgtggccgtgctggtctccaacagcggccgcacctgggacatgctgaccgctgccacgctggcgcgcagcagcggcgccagcgtgctggcaatcacgcacagcggctcgccgctggcgcggctggctgacgtctgcgtgttttccgacgtcgaggaagacagcgaggtctacacgccgatgacctcgcgcatcagccacctggtgctgggcgacgtcctggccgccggcgtggcgcttgcgcgcgccgacaccgtcgccccccgcctgcagcgcgccaaggcgcatctgcgcgaacgacgcattgccggtgcggagccggcccggccagtaccgccggcacgaaaccgcgccaggcccgccgcagccgagccagccacgcccgcgctgcccgccacccgcacgcgtcgccgcaaggccagttgacgctaacgcggcgccggcggtcgcgcccgccagtagcgcggctgcgcctgccggaacaccgacaacgcaaagcccccgggcgcagtgtccatggtcaccgcgccggtttcatcggtccggtagcgcaggacgcccgcgcggccgtagcgctcccacacctcgccgctcgggtggcgatagcggttggcataacccagctggaacaccgccgccgacgggcgcactgcctccagccaggctgcaccggatgaggtgccgctgccatggtgggccaccaccagcacgtcggcacgcagcacctcggccggcaacctgtcgatcaacgcacgctcctgcgccacgccgatgtctccggtcagcagcaggctgtgcgccgccgcatccacgcgcagcacgcagctgcgcgcattgctggcaatggctgcctgctgcgcctgctccgcgagcggatgcagcacggtaaagcgcacgccgtcccactcccattgctggcccgccgcgcatggcgaccagtcattggccgccgacccaagcagaacgtgaccggcaggcgctccggtgctgcgcgcggacacggccaccgccgccgtgatgtccgccacgccgccggcatggtcggtgtcttcatggctgaccatcaggtggtcgatccggccaaccccctcgccccgcagcaatggcaccaccacctgcgcaccggcgctggatcccgacgcataagacggcccggtgtcatacagcagcgcatgggcgcgcgttcgcaccagcaccgccgtgccctgccccacgtccagcatcaccgcgcggaactcgccatgcgcaaccggcgggccgcgcgccagcagcatcggcaacatcagcagcccgccgtgcaggcgcgcgcgcgcggtggcgaccggcgcgaccagcagcccgacaccgagcgccgccagcaccagcgccaacggccccgcgctggccgcttcccacatcgcccatggcagcgccgaaagccagcccagcaccgcggccagcgccaccatagccaggtgggccaccgccagcaccggcccggccagcgccatcggcaaggcggcgccgagcaaagccagcggcgtcaccagcaggctgacgaccgggatcgccaccgcattggccaacggcgacaccaccgatacctggccgaacagcagcaacgtcagcggcaccagcccgatggtcacggcccactgcgtgcgcgccccggcggcgagcacggaccgcaggcgttgccaacgcccttccgtcgaagcatcccggccgggccgggccgcgaagaagatcacggccaccgcgccgaaggacagccagaagccgggcaacatcaccgcccacggatccagcagcaatgccgccagcgccgcccacgccagcaccaccgaggcgggcggcgcacgcgcactccataccgcaatggccgccacgcagagcatggccacggtgcgcagcgccgggacctgcatgccggccagcaggccgtaagccagcgcactggccacggccgccaccagcgcggcctgccgggccggcagccacagcggcaacggccggcgcagccagcggccgagtccgaacgaatgccgccacaacagcccggcaagcgacgccgccatgccggcgatcatggtgatatgcagcccggagatcgcgaccaggtggctgacgccggtgcgccggaacagttgccagtcgtccgcatcgataccgcgctggtcgccaatgaccagcgcggtcagcaccgcgccaaagcgcgcatcggccggcagcgccgcgcgcaggtgatcgcgcacggcggcgcgcacggcctcaatgcgccatgccagccgctccgcggacgcgtcctgcggcggcccttgtgcgcggcgcacatagccggtggcgccatagccctgcgccagcagccaataggcgtagtcagaaccaaaaggattggcgagtccgcgcggacgccgcaggcgcagggtcagcgtgaggcgctgcccgggacgcaggtcgggcggtgcgccacgccagttgaggatcacgcggcgcggcagaggctggcccgcatcaccctgctccacagtcaaggcaaaacgcgtcccggtggcggcatccgccggcagccccgacaccacgccgcgcacgtcgaggtcgcgcgcctccagcgtggccggcagccagtcgcgcatgcgcagttcggcccgccaggccgcccagcagaaggcggcgccgaacgccagcccggcaagcgccaggccatgcagcacgacgtgcaggcgcctgccccacaaggcgatgccgagagcgaccaatgtcagcgccacagcaccgaggcgcaggccatcctgcggcggcagcattgactgctgctgcagcgtccagcatcccgcgacgaaagccaccacgaaccagcgcaccacaactctcctgcgtgttctgcacagagacggttgtaccgccgcagtggggctggaaccttgtcaggctgtcaggaggaagtgaagttgtgtgactggattcagtacagcacgccggtgattcggatggggtgagagcgggcgcatcgacgaagtctgaccggcgaagtcctgtctacctcaggcccggtcgtggcgccatgctttcggcaaaggttcctagccgcggcatcgcatccacggcgttgcgccatgtcgcgtgcgccagcgtcatcgcatcgatgccgcgcaattcagccatcacacgcgccacgcccgccacctccgccggcgtgttgcgcgccttgtgctgttcgccgaactgatcgtcagacagccacgccggcgccatgtcgggtgcgtcggtttccagcaccagcgcctccagcggcagctccgtcgccagccggcggatctgccgcgcacggctgaaagtgacgttgccgccgaagccgagcttcaggccctgctcgacaaagcgccgcgcctgttcattgctgccgttgaaggcgtgggcaatgccgcgcttcacgcccagcttgcgcagttgcgcgccaacctggtcctgcgacttgcgcacatgcagcagcaccggcaggtcaaattcgcgcgcaatcttcagttgctccgcgtagagccaggtctggtgctcagcatccagccccgcgacgaagaagtcgagcccgatctcgccgatgccgacaaagcgcgggtcgcccatgctcgccgccacctcgcgccgcagcgtgtcaaggtcggcctggccggcgccgggcgagcacagcggatggatgccgagtgcatagacgcagcgcacatcgtggcgcgccagcgcgcgcacggcctcgaagttccacgctgccaccgccggcaccacgatgccgcgcacgccggcggcctcggccgcgtcggccacctgctggcggtcagcgtcgaactcgctggcgtcgaggtggcagtgggtgtcgatccacatgggccggcccgctcagcgttcctggtgcaggtgcccgtcgcgcagccgcagcacgcgatcgcagcgtccggccaggtccaggtcatgggtgacgatgatgaagctggtgccgagcgtgcgcgacagttccagcatcaggtcatagacgccgccggcggtgtggtcgtcgaggttgccggtgggttcgtcggccagcacgcaggccggctgccccaccagcgcgcgcgcgatcgccacgcgctggcgctcgccgccggacagctcgcccgggcggtgcttcgcgcgcccgcccaggcccacgcgctccagcatggcctgcgccacgccgcgcgcgtcatgctgggtcaggccgcggatgcgcatcggcatggccacgttgtccagcgcggtgaattccggcagcaggtggtggaactggtagacgaagcccagctggcggttgcgcaccacgttgcgctcgcgctcgcgcagcgccgtgaagggcttgccgagcagcgcgacgcggccggagtcgggctcatccagcccgcccagcacatgcagcagcgtgctcttgcccgagcccgaggcgccgacgatggcaactttctcgccggcatcgacgcgcacatcgacgccgcgcagcacgtccacgtcgagttcgccctggcggaaacgcttggtcaggccctcggccaccagcaccggcgagccggtgcgcggctggtccgcggcgggcgtgggggtctcggcatgcaacacggcttcactcatagcgcagcgcctccgccgggttgacgcgggcggcacgccagctgggatagagcgtggccagcgtggccagcacgaaggagatgatgccgatggtggcgatgtcgttcacgcggggatccgaaggcagttcgctgatgaaatagatgtcgcgcggcaggaactgcacgtgcagcagccgctcgatgaaaggcacgatcacgtcgatattggtggcgatcagcgtgccgccggccacgcccaggacggtgccgataaagccgatggccacgccctgcacgataaagatcttcatgatcgagcccggctgcgcgcccatggtgcgcaggatggcgatatcggcctgcttgtcggtgacggtcatcaccagggtcgacaccagattgaacgcggccaccgcgatgatcagcgtcaggatgatgaacatcatgcgcttctcggtctgcaccgcggcaaaccagttgcggttctgcttggaccagtcgcgcaggtagagctcgcccgacatggtgccggccagctcgttggccacctgcggcgcgcgctgcatgtcctgcagcttcaggcgcacgccggtggggccgctcaggcggaacagggtctcggcgtcatgcatgttgaccagcgccagcgcgctgtcgaactcgaagtgcccggacgagaacacgcccaccacggtgaactgcttgagccgcggcagcacgcccgccggcgtgatggtgccctgcggcgccaccagcgtgaccttgtcgccgacctgcacgcccatggcgttggccagctcgttgcccagcgcgatgccgaagccgcctggctccagcgccgtcatgctgccggcccggaactggctgccgatgtcggagaccttgggctcctgcgacggctccacgccgcgcagcagcacgccgcgcacggcgtcgtcgcgggtcagcatggcctgggccgcgacatagggcgcggcgccggtcacttccttgttctgcaaggcctcggccgcggtcttctgccagtccggcagcgccgacgggccgatcacttcgatatgcgccagcaccgacagcatgcggtcgcgcacttccttctggaagccgttcatcaccgacagcaccacgatcagcgcggccacgccaagggcgatcccgaacatcgagatcatcgagatgaacgaaatgaaggtgttgcggctggcgcgcttgcttgcgcgggtgtatcgccagccgatctgccactcgtagggaaagttcaagaggattcctgttgtttcgggaaagcgccggtgcccggtggaggggcgccggcggcacgcatgcgggccatcgggtgcgccgcctgcctctcgcaagactggcgccggccagccgggagtttacaatctcgccaccatgatgacgcacctgaccctgattgtgcccttttccgtcccgccgggcgccggcgacgacggccgggacgatgtcgtccccggcgcgctgctgcggcagttggagctgcccgcgctcggaaagttgctgacccgggccgagcccggcccgcgcgagcggcatgacgaccccttcctgcgcagcctgccgcaggagcgctggctggccggcaaggcggggttggacccggtccgggtgccgctggcgccctatatgcggctggccgacagtggcggcgccgtccccgccacccccgatggccagtcctggacctgcctgcagccggtgcacatccacgccgcgcgcgatcacctggtgctgatgccgcccgcccagctgggcatccggccgcaggaagccgcggccctgcgcgccgccatcgacgaactgctgctggaatcgggcatcgcgctggaatcaccctgcccgcagcgctggtacctgcccgaagccgtattcggcccgctggaggcgaccacgccgctgcgcgcggcgggccgcaatatcgatatctggatgcaggccggcaaacgcgcccgcgactggcgccgcctgcagaacgagatccagatgacctggtacgaccaccgcgtcaaccaggcccgcgaggccgccggcgaggcgccggtcaattcggtctggctgtacggcggcggcgcgctgcagccggtgccgcggctggccgatacggtgctgagcaacgatcccttcctgagcgggctggccctggccgcgggcagccgcgtgctgccggtgccggccggcctggctggcgccagcgcggtgcagggcacggtgctggccatgctcgacagcgccaccgaagcgcatatcgccgaagactggggcctgtggctggactgcatgcatgcgctggatgccgactggttcgcgccggcactggaagcactggtggccggccaggtcggcgccatcacgctggtgctggccggcgagaatcactttgccgagttcaccgtgcgccgtgccgacctgcgcaagttctggcgcggaatgggccagcgcggcgactggcgcgcactgctgtccgacctcgcctatgccgcataaagccgcctgacacgcgccgcccctactgaaacatcacctgccgccccgcccatgacccggatcgccatccgccaatactctcccgaacacgccagctcgctggcggccgccggcctgcaccccacgctggcgcgcatcctggccgcgcgcggcgtggcgcgcgcggccgagctggccaccgacctgcccgaactggtgccgcccgcggccatgaagggcatcggccacgccgcagcctacctggccgacgccatcgccgccggcaagcgcctgctgatcgtggccgactatgactgcgacggcgccaccgcctgcgcggtgggcgtgcgcgggctgcgcatgctgggcgcgcgggtggaatacatcgtgccgaaccgcttcgagtacggctacggcctgaccccggagatcgtggcgctggcggccaggcagcagccggacgtgatcgtcacggtcgacaacggcatcgccagcgtcgacggggtggctgcggccaatgcgctgggcatcgacgtggtggtgaccgaccaccacctgccggggtcggagctgccgcaggccgcggtgatcgtcaacccgaaccagccgggctgcgaattccccagcaagaacctggcgggcgtgggcgtgatgttctacgtgctgctggcgctgcgcgccgaactgcgccagcgcggcgtctatacccaggccacgcagccgccgctgcagacgctgctggacctggtggcgctgggcacggtggccgacgtggtcaagctggataccaacaaccgcatcctggtggcacagggcctgcgccgcatgcgcgcaggacggatgcagccgggcgtggcggcgctgttccgcgccgccgggcgcgaggcggcgcgcgccaataccttcgacctgggtttcgggctgggtccgcgcctgaacgcggccggccggctggcggacatgtcgctgggcattgaatgcctgctgacggaagatgccaaccgcgcatgggagatcgcgcaggagctggacagcatgaaccgcgagcggcgcgacatcgaggccggcatgcagcaggaggcgctgcagatcctggagcagccgctggccggcccggacccctcagcgcgcttcaccgtcagcgtgttcaacgacacctggcaccagggcgtgatcggcatcgtggcgtcgcgtctgaaagacaagttccaccgccccaccatcaccttcgccccgggcgacgagaccaccgtcaagggctcgggccgctcgatccccggcttccacctgcgcgatgcgcttgacctggtgtccaagcgccatcccggcatgctgctcaagttcggcggccacgccatggcggccgggctgaccgtgcgcgccgagcgttttgccgagttccaggaggccttcgaggcggtcggccgcgaatggctgaccgacgaccagctggcgcgcgtgatcgagaccgatggcgatatcgaggaccagtgcttcagcccggaattcgtcaccctgctggagcagcaggtatggggccagggcttcccagcgccgaccttctgcggcgagttcgacgtgctgcgccagagcgtgctcaagggcaagcacctgaagctgcagctcgggcgcggcagccagcgcctcgacgcgatctggttcaaccatgccgactcgctcggcgccagcgcacaggtggcctaccggctcgacaacaacaccttcaacggcgtcacccgcgtgcagctggtgatcgaacacgcgcagtagcgtgctcccgggggctcccccccgttcagccccgcgacggcaggtaggcagcgggatccactggcttgccgttgccgcgcacctcgaagtgcagctcgctcgggctcgcgcccatgcggcccacgtcctgccctgccgagacctgggcgccttccgtgaccagcggctggtccaggttgccgtagacggtcagccagtcgtcgctgtgcttgacgatcaccagcatgccgtagccgcgcaggttgccgacgtggatggcgcgcccggcggcggcggcgcgcaccgcgccgttggccggcacagcgatgctcaggcccttgctggccggcggcgcgaagccggcggtgacgcgcccgtcggccggccattgcaggcggatgctgctggcgggcggccgggaggccgggccgctgtcgacacgcggggtatcggtcacggcctggccggccgaagcactgcctgaggcaccacccggcggccgcacgcggatcagctggcccacctcgatctggctggggctggtgatgtcgctgttccagcgggtcaggtcgcgtacgctgcggcggtgcttgcgcgcgatcgaatacagcgtgtcgccgcgctcgacgcggtagtagccgtccggcacgggaccgcccgtggtgccgcagccggccgcgaccgcggccgcggcggccagcagcaggcccagcgcgcggcgccggcctggttcgatgtcatgtctggtttgcgtcattcgtccctgttctttgtcgtgccgggggcggcttgcgacccgtattatcgccgcgtgcgacgcccggcaccggcggatagaccgcgccgcggccaatccgttcggtccgcggcccgccgaggcggtccggaagccccgggttgccgcgccgatccgctataattcgaggttttcgaagcgcaggaacatcatggaagcagaacgcctcaacgccatctccggtgccatctccgatctccgttcgcgaacggaagatctacgggggtatctttgactacgatgtcaaagtaggaaggctggacgaagtcaacggtttgctggaagaccccgacgtctggaacaaccccaagcgggcccaggacctcggcaaggaaaagaaggcaatcgagggcgtggtaagcgtgctcagcaagctcaccgacgacctcagcggcgccgaagagctgtttgagctcgccagggaagaaggcgacgacgacaccctcgaagcgatcgaggccgacgtcaagggcttcgaggagatcgtcgcgggcatggaattccgccgcatgttctcgggcgagatggaccaggccaacgcctttatcgacatccaggccggcgctggcggcaccgaagcgtgcgactgggcctcgatgctgctgcgccagtacctgaagtactgcgagcgcaagggcttcaaggccgaggtgctggaagagtccgaaggcgacgtggccggcatcaagagcgcgaccatcaagatcgagggcgaatacgccttcggctacctgcgtactgaaaccggcgtgcaccgcctggtgcgcaagtcgccgttcgattcgtcgggcgggcgccatacctcgttctcgtcggtgttcgtctaccccgaggtcgacgattcgttcgaggtcgaggtcaacccggcggacctgcgcgtggacacctaccgcgcctcgggggcgggcggccagcacatcaacaagaccgattcggccgtgcggatcacgcacatccctaccggaatcgtggtgcagtgccagaacgaccgctcacagcaccgcaaccgtgccgaagccatgtcgatgctgaaatcgcgcctgtacgagcacgagatgcgcaagcgccaggccgaggccgacaagctcgaagccggcaagaccgacgtgggctggggccaccagatccgctcctacgtgctggaccagagccgcatcaaggacctgcgcaccaacgtggaaatgtccaacacccagaaggtgctggacggcgacctggacccgttcatcgaggccagcctcaagcagggactgtaaggccgtaccgggccgcccgcggcggcacagcaacatcaccgcaatcgctggatcatcgctgtaccgccgcagctgcggcctttccgaccggggcaccatgagcgaagccaatcacctctacatcatcaccggcgcctcgcgcgggctgggcgcggcactgaccaatgccctgctcgtgccgggcaaccgactgatctgcgtggcgcgcagccgcaacagcgagctcgagcgcatcgccaccatgagcggcgtgccggtggcctggcacctgcaggacctgtcgcaggccggccccgccgcaacctggctcgccagcgtgctcgatacgctcgacatcccgccgaccagcgccacgctgatcctgaacgcgggcgtggtcgaaccgatcggcccggtcacgcgcctgcaggagaaaaccctggtgccgcacctgctgaccaacctggcggcgccgatgacgatgaccgcggcgttcctggagcgcaccgagaagttcgactgcccgcgcaaggtgctggcgatctcctccggcgcggcgcgccgcccggtcgaaggctggagcgcctactgcgccggcaaggccgggctggacatgttcatgcgctcggtcaacgccgagtacgcccaggccgaagccccgcgcaccgtgcgcgccgtggcgctggccccgggcgtgatcgacaccggcatgcaggccaccatccgcaatgccgacttcgcccaggtgcagcgcttccgcgagctgaaagccaatgaacagctggcgtcggccgaggaaaccgccggccgcatcgtcgcctacctgcaccgcccggatttcggcagcaccgagctggacgatctccgcaactactaagccgcacccatcaagccatctgaatccgcgcgcggcacgccgcgcgcgatccgacaagacatcatgactgaaccgaaccgcgcccaggccaagccagccgccgcagatactcccgccgtcgacgagaacaagatcatcgcggagcggcgcgagaaactggccgcgctgcgccagcaaggcgtgcccttccccaacgatttccgccccacccaccaggccgccgcgctgcaggcgcaatacaccgagaccgagcaggccacgctcgaggccgcgccggtcgaggtcgccatcgccgggcgcatgatgctcaagcgcgtgatgggcaaggccagctttgccacggtgcaggacggcagcggccagatccagttctacatcacccgcgacaaggtcggcgaagaggtctacgcggccttcaagcactgggacctgggcgacatcatcagcgcccgcggcgaactgttccgcaccaacaagggcgagctgtcggtgcaggtgcgcgagctgcgcctgctgtccaagtcgctgcgtccgctgccggacaagttccacggcctggccgaccaggaaatgaagtaccgccagcgctatgtcgacctgatcgtgtcgccggaaacacgcaacaccttccgcgcccgcaccaatgcgatctcgtcgctgcgccgccatatggccgatgccggcttcatggaagtggaaacgccgatgctgcacccgatcccgggcggcgccgcggccaagcccttcatcacgcaccacaatgcgctggacatgcagatgttcatgcgcatcgcgcccgagctgtacctgaagcgcctgatcgtcggcggcttcgagcgtgtgttcgagatcaaccgcaacttccgcaacgaaggggtgagcccgcgccacaaccccgagttcaccatgatggagttctacgcggcctacacggactaccgctggctgatggacttcaccgaggacctgatccgcaaggccgcgatcgatgcgcgcggcagtgccgtgctgacctaccaggaccgcgagctggacctgtccaagccgttccatcggctgacgatctgccaggcgatccagaagttcgcaccgcagtacaccgatgcgcaactggccgatgccgggttcctgcgcaccgagctgaagaagttcggcgtcaacaccaacgcgccgcagttcctcaacgccggcctgggcacgctgcaactggtgctgttcgaggaaaccgcggaaaaccagctgtgggagccgaccttcatcgtcgactacccggtcgaggtctcgccgctggcacgcgcctcggacacggtgcctggcatcaccgagcgctttgaactgttcatcaccggccgcgagatcgccaacggcttctcggagctgaacgatgccgaggaccaggccgaccgtttccgcaagcaggtcgagcagaaggacgccggcgatgaagaagccatgtacttcgacgccgactacatccgcgcgctggaatacggcatgcccccgacgggcggctgcggcatcggcatcgaccgcctggtgatgctgctgacggatagcccgaatatccgcgacgtcatcctgttcccgcacctgcgccgggaagactgagcaagcgctttggcaagatgaagccccaccgaatcggtggggctttttccttggggcgccgccaatgtcatgccaagccgccgaatgttacagcctggccccgtgatatgcgccccaaccaaccataaggcattgatataaaagatattttccgcctacatatatttacaaaaacaaacggaaaaccccacccgcttcggccacactggttccatcccaacgcggccttcgccgcaccggagccatagcaatgcaaagccaagccaccccgaacgacaacacccctgccccgctgccgccgcaacgccggctgcatccgctcgtcggtgcggcagccgtcgccgtggtgatcgccagcctgaccgcggtcgccgccgtcactggcgtgctgccgatcggcaaggccagccctgacctgccggcgcaggccggtgcgcaggcagacccgcaagggccgctgccggtcacggcagcgcccgccccgggcagcacaacccggccgccggtctacaacgacggccagcagcgcccggccggccaggatgccaccggttcgtcgcaagccgcgccacgcaccgccccggcacgccaggccgcgcagcgcgacagcgagccgcgcgccagccagcgtgccgacaccgagcgccaggctgccaagggcagcccctacgccggccgtatcgtctcggtgacgccgatccagacccagaagcccaacaccagcggcctgggcgcgctcggcggggccgtggtgggcgggctgctgggcaaccaggtcggcaagggcaatggccgcatcgtcggcaccgtggtgggtgccgtgggtggcggcgtggccggcaaccagatcgagaagaccgtcagcaaggacacgcactatgaagtgcgcgtgcgcatggatgacggcagccaccgcaccttcacctacgagaaagaccccgccgtgcagccaggcgagcgcgtgcacctggagaacggcgcgctgatgcggggctgatccggctctcgcgcagcagcaaagcaaaaggccggcaatttgccggccttttgtcgccatcccgatactgcgtcgcttattcggcttcctggatccaggcctgctggatcgcctccaggatcttctcgcccgagcgctcgggcgcgtcggcaaagccgtcgagctccagcacccagcggcgcaggtcagtgaagcgcacgcccgccggatcgacatccgggaacttgtcatacagcgcttcggcaatggcgtaggtatcggtccacttcatgggattgttctccgctgagatttgccggccgctcagtggccttccttggcgtggttgatggtgtacttcgggatttcgatggtcaggtcttcatcatcgacgatggcctggcacgacagccgcgaattcggctccagcccccaggccttgtcgagcaggtcttcttccttctcctcggcctcgttgagcgaattgaagccctcgcgcacgatcacgtggcaggtggtgcaggcgcacgacttctcgcacgcatgctcgatctcgatgccgtgcgagagcagcgcgtcgcagacgctgacgcccttctcggcttcgatcaccgtcccttccgggcaatattcaacgtggggcaaaacaacgatctgtggcatgtggtgtcctgatgtctgtatgtcggtgcgggcccggtgatcagcccagctcctgcaccttgcgcccggccagcgcgctcttgatcgaacggtccatgcggcgggcggcgaattcgtcggtaccgtgcgacagcttctccaccgcggcgtggatggcgtggtggtcttcgccggtggcgatctcgcgcaccgtagccatcagcgcctcgaccgcggtgcgctcttccgccgacagcaggtcgccatcggtttccagcgcgcgctgcgtggcctcgaccagccggtcggcttccacgcgctcttcggccagcgcgcggctcttcatgtcgtgctcggcctcgcggaagctttcctgcagcatgcgcgcgatatcgtcgtcggccaggccgtacgacggcttgaccgtgaccgaggcttccacacccgaatgcgtttcgcgcgcggtcaccgacagcaggccgtcggcatcgacctggtaggtcacgcggatgcgcgccgcgcccgccaccatcggcgggatgccgcgcagctcgaagcgcgccagcgagcggcagtcgctggccagctcgcgctcgccctgcagcacgtggatcgccatcgcggtctggccatccttgaaggtggtgaattcctgcgcgcgcgccaccgggatggtgctgttgcgcgggatgatcttctcgaccaggccgcccatggtctcaacgcccagcgacagcgggatcacgtcgagcagcagccagtcttcgcccggggcatggttgccggccagcaggttggcctgcatcgcggcgcccagcgccaccacgcggtccgggtcgaggttggtcagcggggtctggccgaagtagtcgcccacggccttgcggatcgacggcatgcgcgtggcgccgccgaccagcaccacgcccttgacctcgtcgggcgcgacgcccgcgtcgcgcagcgccttgcgcaccggcgccagggtcttctgcaccaggtgcgcggtgacctggtcgaagatctcgacagtcagcgtcaggtggacgatctcgccggactccagcacggcgtcgatcacggtgctgtcgctttccgacagcgcttccttggccgcgcgcgcacgcaccatcagcaggcgcatgtcctgcgccgatagcggctgcaggctggcctgctcgacgatccagcacagcaggcgctggtcgaagtcatcgccgccgagggccgagtcgccgccggtggccagcacctcgaacacgccctgcgtgagcttgagcaccgagatatcgaaggtgccgccgcccaggtcgtaaaccgcgtagatgccttccgaggcattgtccaggccgtaggcaatggccgcggcagtgggctcgttgagcaggcgcagcacttccaggccggccaggcgcgcggcgtccttggtcgcctggcgctgggcctcgtcgaagtaggccggcaccgtgatgacggcgccgaccaggtcgtcgcccagcgtgtcttcagcgcgctggcgcagcgtggccaggatctcggccgagatctccaccgggctctttacgccggcggcggtcttgatctgcagcatgcccggcgcgtcgacaaagtcatacgggctgtgctcgatattggccacgtcgcgcaggccgcggcccatgaagcgcttgaccgagacgatggtgttcttggggtcgcgcaccgcttcttcctgggcccggtagccgatatgggcggtacggtccggcaggtagcgcacgaccgacggcagcagcgcgcggccgcgctcgtcgcccagcacttcgggaatgctgctgcgcaccgcggccaccagcgaattggtggtgccgaggtcgatgccgacggccaggcggcgttggtggggcgccggcgacatgccgggttcggaaatctggagcagtgccatggtatttctttgctgtcttgtgcggcagtggaaaccgccatgcgggtggcattggggagcggttttcgcgccgggcgccattgtgtcacggccccggcaaacgtgccggtcagtgttccagccggtcgatggcctcgctggtatcgtgctcgatcttctcgataaacatcagttgccgcaccgcgccgccagccgcctcgttgtcgccggaatccagcaacgcgcccagtgcttcgtggcgctcacgcttttcctggcgcagctcgcgcagcagcgcatcgagccggtccactgcgcgctcttccaccgcttcctgcagcgcttcgcgccattccatctgctgcatcaggaaggccggagtcatggccgtgttgttctcggcctgcacatcgacgccgcgcagcttcagcaggtaggtcgcgcgccgcaacggctggcgcagcgtacggtaggcttcattggcatgcgcggcccattgcatggccacgcggcgctcggcgtcgcccgccttggcaaagcggtccggatgcgcctgcgactgcacggtgcggtacgccgcatccagcgcggcgtcatcgacgccgtactgcgccggcaggccgaacagcgcaaaaaaatcgtctttcaactgcttccccaagaaaaaagagcggccgcgccgcccctttgtccattgccgccacggtgccgctcaggcgggcttgcgtgccccctcggccggcggttcgttgcggtcgcacttcaggcagttcacccgcatgccgatcatgccggcgcggccctgctcgctttgcgtccatggccgcgactgccatggcgggtcgtgccgcatatgctggccgtgcccgcattcgagttcggccacccagtggccttcctcgtcccggcggaacccgacgatgctgcgctccaccggggcttgcttgcgctggcgcgcctcagaccgtgaaggactcgccgcagccgcactcgtccttgacgttggggttgttgaagcggaaaccttcgttcaacccttcacgtgcgtagtcgagttcggtgccgtcgatatacggcaggctcttggcgtcgacgatgaccttgatgccgtgcgattcgaacaccgcgtcttccggcagcagctcgtcgacgtattccagcttgtaggccaggcccgagcagccggtggtcttcacgcccaggcgcaggcccacgcccttgccgcggcgttccaggtagcgggccacatgcttggccgccttctcggtcatggtgatcatcgttgcgtcttccttcgtcgatgccgtggtcagtgcgacagaatcaggcagccttctgctcggcgccgtgcttcttcttgtagtcttcgacggcggccttgatcgcgtcttcggccaggatcgagcagtggatcttcaccggcggcagcgccagttcttcggcgatctgggtgttcttgatctccagcgcctggtccacggtcttgcccttgacccactcggtcacgagcgaggacgaggcaatggccgagccgcagccgtaggtcttgaacttggcgtcttcgatcacgcccgcctcgttgaccttgatctgcagcttcatcacgtcgccgcaggccggcgcaccgaccatgccggtgccgaccgcatcgtcgttcttgtcgaacgaaccgacgttgcgggggttttcatagtgatcgagaaccttggtgctgtatgacattttgcttacctcttgcgtatctttgcgggggtattgcgttttgttctgatgatctgtgcgggcgcgtcagtgcgcggcccactggatcgaattcaaatcgacgccgtccttgaacatttcccacagcggcgacaggtcgcgcagcttgccgatcttgctcttgagcagttcgatggtgtagtcgatctcctgctcggtggtgaagcggcccaccgtgaagcggatcgagctgtgcgccagttcgtcgttgcggcccagggcgcgcagcacatacgacggctccagcgaggccgaggtgcaggccgaacccgacgacaccgccacgtccttgatcgccatgatcagcgactcgccttcgacgaagttgaagctgacattcaggttgtgcggcacgcgctgttccaggtcgccgttcaggtagacctcttccatgtccgacaggccgttccacaggcggtcgcgcagcatgcggatgcgttcgttctcggtcgccatctcttcgcgggcgatgcggaaggcttcgcccatgccgacgatctggtgcgtggccagcgtgcccgagcgcatgccgcgctcatggccgccgccgtgcatctgcgcctcgatgcgcacgcgcggcttgcggcgcacgtacagcgcgccgatgcccttggggccgtaggtcttgtgggccgagaacgacatcaggtcgcacttcagcttgcccaggtcgatcgccaccttgccggttgcctgcgcggcgtcgcaatggaagatgatgcccttctcgcggcagatctcgccgatctgcgcgacgtcctggatcacgccgatctcgttgttgaccagcatcaccgacaccaggatggtgtccgggcgcagcgcctgcttgaacacttccatgtcaagcaggccgttttccttcacgtccaggtaggtcacttcaaagccctggcgctccagctcgcgcgtggtgtcgagcacggccttgtgctcggtcttcagggtgatgatgtgcttgcccttgcccgaatagaagttcgcggcgcccttgatcgccaggttgttcgattcggtcgcacccgaggtccacacgatctcgcgcgggtcggcgccgaccagtgcggccacctgctcacgtgcttcttccaccgcgcgctccgcttcccagccgtacgcgtggctgcgcgaggcggggttgccgaactgctcgcgcaggtacggaatcatcttgtccgccacgcgcgggtccaccggcgtggtggccgagtaatccatgtagatggggaaatgtggggtgctcatcgttatgactgccttgttagggaccgctgatcgctgttttgctgtcgttgcctgggcgcgctcaggactgcgccaggctgaaaactgaattcaccattctggcccggaccggcttttcctgcttgtcggccttgccgcgcgcagcggccgcgaccggctgcgcggcgtcctcgcgcatgtcgtgcagcacggccggctggcgctcgcgctgctggtccaccaggttcttgagggaaacggagtcgaggtactcgaccatcttctggttcagcgtggcccacagttcatgggtcatgcagcgcccggagccgtcatctccgttacaattgcccttgccgccgcactgggtggcatccaggggctcgtccacggcgatgatgatgtccgccacggtgacgtcttcggccttgcgcgccagactgtagccgccgcccgggccgcgcacgctttcgacgatctcgtgccggcgcagcttgccaaacaactgctccaggtaggacagcgagatcttttgccgctggctgatgccggcgagcgtgaccggtccctggtcctggcgcatggccaggtcgatcatcgcagtgaccgcgaagcggcctttggtggtcagtctcatggtgcagggctctgggggtgaagctaatacttgatcgtttccgtcaagtataaaggtacccgactaattcagtcaactacccctgccgcagcgcaccacgccccgatcacgcttcgcgcccgcccgcggccgtctccgggcctgccgcgcgcggcggaatcaccagcgacaacgggtgcttcaggatgcgccgccgcacggccgcgctcagttcggcgcggtccacgcgccgcaggttgcgtgaccgcagcgccatattgaacgccagcgcgaagctcaccgccacgttcagcatccccatcagcgcaatgcccgccaccgccagccacagcgacggcatgcgcagtgcatccagccccagcacgccgatggcggcgccgaccgagcccgtcgacagcgtcacatggcgcacttccatatggggcccgaagaagctcaggatttccggccccagccccagcagcaggcccagcgacacgttggcggctatgcccgacaggttgcgcttccagaaatccgccagacgggtggcgccgcgcgcacccagcacgtactggaggcgccggttgtaggccatcacgtcgtgcacgcgatgcagcgcgaaccagttgtcggcccagccggcaatcaggctggacagccacagcagcacgccggtgaaggcggcatagagcggcgtcgggcccaggatcgagaacgactcgatggtggcaatcgccttggccggcgtgatcaggttggcgccgagcagtttgtgcgccagccactggatccccagcgccaccgggaacaccaccgccaggttgccgacgatcgccgccgcgttggagcggatcatggcaatggtgtcgtcgacgaatatctcgcgcccttccggccgccctgccccgtccagccggtgcgccagcgccggcccggtcatggccggctgcttggtcgccagcgtgaagtgcgcaaagtggatggccaggaagctgccggcgtagttgagcgaggccagcaacccttcactgaacttgtccaggtgcaggccgtagatcaggaacttcaggtacacggtggcgaccgagaccaggccgccgccggccgcggcgcgcaccagctcggcgtattccttgcggtcgcgcgtgatgtagtgctcgccggtctcggccgagcgctccaccaccttgcgcgccagctgcgcgaacgaggtgccggccaggtgcgagatgctgcgccgggcctgggtcgatcggatcagctccgccaccaggtgcgcatgcatgccgggccggcggggctcgacccaggccgccagcagcagctcgatgcggctgagctgcaccttcatgcgctcgatctggaacaccacctcgaccgacacgccgttttcctccaggtcctcatacacctggcggatcgcggcatggcagccgtccagcagcgcgcggaagtagttcaggcggtggccaaagctgttgtcgtcatggcgcaggccctcttcacgcaaggcctggatggcctcgtccaggcggaagaacggtgtctcttccacccgcccggccaggcgcgaacggatcgcctgactcaggccggtggcgcgcacctggctgaccagcaccgcgatgctggtggccagcgtctggcccagcgcatcgcgatagtgcgccatgcccgccgcttcgcccccggcgctgccggcctgcagcacgcgcgccagccgcgccagcagcccatcgtcgatggcctcgacccactccgcgtcctcatccccgacgaacaccagcgcaaacagccccgccatgtcgctgcggttgggcggcggcggcaggaagcggttctgcagccggcccaccatctcgctgacgaagcccgggtgcagggccacgccggtatcgcagaacagtccggtggggtcgttctcgcgcaccaggctgcgcaccgtcagggcgaaacgcccggcccagtcgggatgccgctccagcacctgcagcaggtagcgcagccgcacatgctcggggtggcggcggtccgtgccaggttcctggctgtcagtatcggcgcccagcccgccatcgcggcggatccagaagcccaactcgatcagccagccgttgcgctcggccagcggcgcctcaggatcggcagcggccaggatggcgtcgagctgcaggcttgcattgcgcgattcgcgccatttgcggaacagtttgcgaagcatggattctcgtgggatcggtccgccgggcgcggcgccggaggcgtcgcggcgcgggccgcagaaaggacgatggagcgggcgccgggatcagccggcgttgccttgcaggcgctggcgcaactcggccaccaggccgtcgcaggcatcttcgatgtagtcgagcacgcgctcgaagccatcgccttcgccgtagtaggggtccggcacctcgtcggcgtcgtggcgggtggcgaagctcatcagcaggcgcagcttggcgccggcatcggggcgcagccgcgccaggccggccaggttctcgcggtccatcgccaggatcaggtcgaagcggtcgaagtcaggcaggccgaccttgcgcgcgcgcagcgcggacaggtcatagccgcgctgcagcgcgtggcgctgggtgcggggatcgggcgcgcggcccaggtggtattcatgcgtgcccgccgaatccagttccaccagtgcgtccagccccgccgcagccagcttggcgcgcagcacgccctccgccgtcggggaacggcagatgtttcccatgcaacacatcaggatggcgtatgtcttcatcggatcacggcttggcgggagtggaacggcgggcgcaccggcacacggcaaggccgccggccggacagccgcaattctacccgcagcccttcaggccagctgcttggccagccgctcgccgtgcgcaaacccggccacttccgcggcctcgcgcgatttgtagtgctcggtgatgcgcgaggtctcggtcagcgtgccggcggcgcggatattggtgccggggcggcagacgcgcacggtgtaggaccattcgctctgtgagcgctgtttgacctggacctgcacctcgtgggtttcatagaccttcttcttccattcaccgatatcgctcattgtggttctccacggaaaatgggtgatgcctggctagttgacctcgccggcgtcgatcgcgcgcatggcgccggcctccgccagggcgatggccccttcgggcgtgggcgcgtcgcccgcaatcgcctcgtagctggggccggatggctcgccgaaggcatcggcgatgcgcatctgcgccgcaaacccgccggcggcattggggaccgcgctgaccacgaccgcgtagccgccgtattcaaactggcgttccatcttgcctcctttgcggcagccttcgcgctttcacccttcatgaccggcgccgccgcgaatttcactataggcgaagcgcgcgtggcggtgcggcgtatcaggcaggcggcagcgcgccctctccactggcgccgaacacctgcgccttgagcttggccagctggtcgcgcacctgcgccgcctgctcgaactccaggttgcgggcgtgatcgagcatgagcttctccaaacgcctgatttccttggagacctgcttctcgctcatgtcctcgtagcgggcctgctcctgcgccgccagcagctcggccctggcatcgttgacgctatagacgccgtcgataatgtccttgatgcgcttgaccacgccgcgcggcgtgatgccgttggcctcgttgaaggcgatctgcttggcacggcggcgctcggtctctccaatcgccttcttcatcgactcggtcatgcggtccgcgtacaggatcgcggtaccgttgacgttgcgcgcggcgcgcccgatggtctggatcagcgagcgctcggcgcgcaggaagccttccttgtccgcatcgaggatcgccaccagcgacacctcgggaatatccaggccttcgcgcagcaggttgatgcccaccagcacgtcgaaggtgcccaggcgcaggtcgcggatgatctccacgcgctcgaccgtgtcgatgtccgagtgcaggtagcgcaccttgacgccgttctcggacaggaactcggtcagctgctcggccatgcgcttggtcagcgtggtcaccagcacgcgttcgccaacctccacgcgggcgtggatttccgatagcaggtcatccacctgcgtggtcgccgggcgcaccatgatgatgggatcgaccagcccggtcggacgcaccacctgctccaccacctgcccggcattgtcctgctcgaactgcgccggcgtggccgaaacaaacatcacctggcgcatcttgcgctcgaattcgtcgaacttcagcggccggttgtccagcgccgagggcagccggaagccgtactccaccagcgtggtcttgcgcgcgcggtcgccgttgtacatgccgttgagctggccgatcagcacgtgcgactcgtccaggaacatcagcgcgtcgggcggcaggtagtcgaccagcgtcggcggcggctcgcccggcttcgcgccggacaggtgccgcgaatagttctcgatgcccttgcagaagcccagctcggacagcatttccaggtcgaagcgggtgcgctgctcaagccgctgcgcctccaccagccggttttccttgtggaagaactccagccgctcgcgcagctccgacttgatcgcctcgatcgcgcgcagcacggtctcgcgcggggtcacatagtggctcgacggatagaccgtgaagcgcgggatcttctggcgcacgcggccagtcagcgggtcgaagaactgcagcgactcgacttcgtcgtcgaacatctccagccgcaccgccatctcggcatgctcggccgggaagatgtcgatggtgtcgccgcgcacgcggaaggtgccgcgctggaaatcggtctcgttgcgggtgtactgcatcgcgatcaggcgcgcgatcacatcgcgctggctgatcttgtcgccggcccgcaaggtgagaatcatctggtggtattcggtcgggttgccgataccgtagatcgcagagacggtcgccacgatgatcgtgtcgcggcgctccagcaggctcttggtcgccgacagccgcatctgctcgatatgctcgttgatcgacgagtccttctcgataaacaggtcgcgctgcgggacgtaggcctcgggctggtagtaatcgtagtagctgacgaagtactcgaccgcgttgcgcgggaagaactcgcgaaactcggcgtagagctgggccgccagcgtcttgttgggcgcgaacacgatcgccggccgtcccatccgggcgatcacattggccatggtgaaggtcttgcccgaacccgtcacccccagcagcgtctggaacgacaggccgtcctcgaccccctccaccagttgccggatggcctccggctggtcgccggcgggcgggaacggctggtagagctggaacggggagccggggaatgtgacgaatttgtcttcgtccagggccggcgcggcttctgcaaggttcgacatagggggcgaatttacgggcgggattagggaaatacctcaggaatacggggcgaatacgctagaatcttggggttgccagcccccgcttcaagccggaagcgtcacgggggcctgtcagcccccagcgcagtccgaagcattctacgccttcccgttttcttacatagccgaccacgagattccaaatgagtttgttttctgccgtcgagatggccccgcgcgacccgatcctgggcctaaacgaagccttcaatgccgatacccgcccgaccaaggtcaacctgggcgttggcgtgtacttcaccgacgaagggaaaatccccctgctgcgcgccgtccaggaggcagaaaaggcacgtctgaccaccgccacgccgcgtggctacctgccgatcgaaggcattgccgcctatgaccaggccgtgcagacgctgctgttcggcaaggaatcgccgctgatcacggaaggccgcgtggtgacggcccaggcactcggcggcaccggcgcgctgaagatcggcgccgacttcctgaagcgcctgtatccggacgccaaggtcgccatcagcgacccgagctgggaaaaccaccgcgcactgttcgaatccgccggcttcccggtggtcaactatgcctactacgatgcccccagccacggcctgaactttgccggcatggtggaatcgctgaagtcgttcccggccaacaccatcgtcgtgctgcacgcctgctgccacaacccgaccggcgtggacctgtcgcccgagcagtggaagcaggtggtggaactggtcaaggaacgcaacctgatcccgttcctggacatggcctaccagggctttgccgacggcatcgacccggacggcgccgccgtgcgcctgttcgcggactccggactgcccttcttcgtgtcgagctcgttctcgaagagcttctcgctgtacggcgagcgcgtcggcgcgctgtcgatcgtcaccaccagcaaggaagaagcgcagcgcgtgatgtcgcaggtcaagcgcgtgatccgcaccaactactccaacccgccgacgcacggcggcaccgtggtcgcgaccgtgctgaacagcccggaactgcgcgccatgtgggaagaagagctggccgagatgcgcgaccgcatcaagctgatgcgccatgcgctggtcgacaagctggccgccaagggcgtgccgggcgacttctccttcgtcaaggcgcagcgcggcatgttctcgtactcgggcctgacctcggcccaggtggaccgcctgcgcaacgagcatggcatctacgccgtcggcaccggccgcatctgcgtggccgcgctgaacagccgcaacatcgacgccgtcgtcgatgcgatcgcagctgtgatgtaaaaggcttttgcaatcgccatcccgcaacaggtggcgactggcgcaagcgtcacaaagcaatgcacaaaaagcggcttcggccgctttttgcatttgtttacgatttatcagccaatgtcatcaagaaatcagccttttaccttattgttttccgcagcaacagatgtactttaaggtatatgctgcagagcaagatcgttagcacggtcgttcggttaaaggcataatcggcgccacgatcccccggtgtattgtcagtacattagtacttggtagtacgtacctcttagctagacccaggcagaaaaggcatgctctaccaattgcatgagttccagcgctcgatcctgcacccgctgaccgcgtgggcccaggcgaccgccaagaccttcaccaaccccctcagcccgctctcgctggttcccggcgcaccccgcctggctgccggctatgaactgctgtaccggctcggcaaggaatacgaaaagccggcattcgacatcaagtcggtgcgctccaacgggcgcgacatccccatcgtcgagcagaccgtgcttgaaaagccgttctgcaagctggtgcgcttcaagcgctatgccgacgacccggagaccatcaagctgctcaaggatgagccggtggtgctggtggccgcgccgctgtcgggccaccatgccacgctgctgcgcgacacggtgcgcacgctgctgcaggaccacaaggtctacgtcaccgactggatcgacgcacgcatggtgccggtcgaggaaggcgcgttccacctgtcggactacatctactacatccaggaattcatccgccatatcggcgccgagaacctgcatgtgatctcggtatgccagcccaccgtgccggtgctggccgcgatctcgctgatggcctcggccggcgagaagacgccgcgcaccatgaccatgatgggcggcccgatcgacgcccgcaagagccccaccgcggtcaactcgctggcgaccaacaagtcgttcgagtggttcgagaacaacgtcatctacaccgtgccggccaactaccccggccacggccgccgcgtctacccgggctttttgcagcatgccggtttcgtggcgatgaacccggaccggcacctttcctcgcactatgacttctacctgagcctggtcgagggcgatgcggatgacgccgaagcccacgtgcgcttctacgacgaatacaacgcggtgctcgacatggccgccgagtactacctcgacaccatccgcgaggtgttccaggaattccgcctggccaacggcacctgggccatcgacggcaatccggtgcggccgcaggacatcaagagcaccgcgctgatgaccgtcgagggcgaactggacgacatctcgggcgcgggccagaccgccgcggcgcacgacctgtgcgccggcatcccgaaaatccgcaagcagcacctgaacgcggcacactgcggccactacggcatcttctcgggccggcgctggcgcgaagagatctacccgcagctgcgcgactttatccgcaagtaccaccaggcctcggccaccaggtaagaaaacgcccgcgattgcgggcgtttcttcttgcggggccgggatgctcagtgcttcttcaggtagctgagcagcatttccgagtgcagctcggcaaagcgctcatgctcctgctgcgaggccacgtcgcggccgatcacggcactgatggtatagcggttggacagcacgtagtagcccagcgcggaaatcgtcaggtagaactgcggcacgtcgatatcgtcgcggaacacgccttgttcctgcccgcgccggatcacgtcggccagcacatccaccaccgggttgatcagctgctgcagctgcgccgactttttcaggtgccgggcctcgtgcaggttctcgctgttgaccaggcggatgaactccgggtgctcgtaataccagtcccagacgaaacgcgccagcgtgcgcacgccctggaccgggtcttcgtcgaccaggtgcagctgctcctcgtcggcgcggaaattagcgtattgcttctcaagcaccgccaggaacaggccttccttgctgccgtagtagtagtacagcattcgttcgttggtttccgcgcgccgggcaatctggtcgacgcgggcgccggccagaccccccttggcgaattcctcggtggccgcagcgaggatgcgtcggcgcgtcccttccgggtcgcgtttggtcttgggctcagttgacatggggtggctggtcgatcgttgcgcggattatggcataggccggaatgcggcaatccggcggtgcgcgcatcatcgccgtttctgcccgccggcgaaatcggggataatccttgcggcgcgatggctcgcaggggtccacagagatcccggtgccgcagggtcgctggcctattgtccgccgccgggttcggctgttatgtcgccaaaccctcacagcgccccgtaaatatcgtgtcttgaccgttctgatccggccttggtccctgtcttgtcccctgatttcctgcccgtagtcgtgaatcccgccgtcaagtcccttgccgaccgcatcgaagcgctgctgccacagacccagtgcacaaaatgcggcttcaacggctgccgcccctacgccgaagccatggccagcggcgaagccgcctgcaaccgctgcccgcccggcggcgcggaaggaatcgtgcgcctggccgcggcgctcggcaccgaaccactgccgctggacccggagcgcggcagcgaacagccgcgcgcggtggcccgcatcgacgagagcctttgcatcggctgcacgctttgcatccaggcctgcccggtcgatgcgattgccggcgccgccaagcagatgcatacggtgatccctgactggtgcaccggctgcgacctgtgcgtggcgccctgcccggtcgactgcatcgacatggtcccggtcaccggcgcgcgcaccggctgggccgcgtggtcgcaggcgcaggccgatgccgcgcacgcgcgctacctggcgcgcaatgcgcggctggtgcgcgagcgcgaggaaaacgacgcgcgcctggccgccaaggccgccgccaagctggccgcggtgcaagccgaagcgccggagaacgatgccgagcgcgccgcgcaggaacgcaagcgcgccatcatccaggccgccatcgaacgcgcccggcagaagcagcaggccgcgcagccgcgcaatacggagaacgtctcggctgcggtgcaggcccagatcgacgccgccgaagcacggcgcgcgcgcgcgggacttgccaggcctggatccgaccagaacgccaataccgacccggaagaaaaacaatgaacgccgccaagtgccgtgccatctttgagacgctgcgcgaaaccaaccctgccccggccaccgaactggaatacagctcgccgttcgagctgctgatcgccgtgctgctgtcggcgcaggcgaccgacgtcggcgtcaacaaggccacgcggcggctgttcccggtagcgcataccccacgccagatgctggacctgggcgaagccggcctcagcgagtacatcaagaccatcgggctgtacaagaccaaggcgaagcatgtgatcgaaacctgccgcatcctggtcgagcgccacggcggcaaggtcccgcccgagcgcgaagcgctggaggcgctgccgggcgtgggccgcaagaccgccaacgtggtgctcaacaccgcgttcggcgagcccaccatcgcggtggacacgcatatcttccgggtagcgaaccgcaccgggctggcgccgggcaagaccgtgcagatcgtcgagcagaagctgctcaagtgcgtgccgcatgagttcctgcacgatgcccaccactggctgatcctgcacggccgctacgtgtgcaaggcgcgcaagccagagtgctggcactgcgtgatcgagccgctatgcgagttcagggaaaagacgccggcgccgcagctgtaacccgggcctgatgtcctagtccggctcgtgcgccagcaccagggccagctgtagcgcggtgcgcgcgacgacctccacctcgggcgcgtagccgtgcgtgatccagcgcagggcgatgtggaccaccccgcccgccacccccgccgtcagcaacggatcgagcttgcgtcccggcggcagcagcgcttgcgcgagcagcccgccgaattcatccagcgaatccgccagcgccccgtcgaccagcttgctgacgccgcggatttccaccaggaacacccgcgctgaacgcggctcgcgccgcagcgccccgaaataggcgcgcagcatggccagcgcgcgttgctggccctcgcctccggccccctcgcccgccagggcgagggtgtgcagcaagcggtgggtcaccgtttgaaacgatgccagcagcaaggcctcgctgttggcgaacgactcatagaaataccgttcggtaaggcccgcggcctcgcacacggccttgacggtggcgttctggtagccgcgctcgccgtagacctgcacggccgcggcaatcagctgcacacggcgttgggcacgtcgttcttcggcttcggcgccgcggtagcgacgcgcgggggtgagctcggtcgtcatgcgcgccattatgacattccctattgtcagattccttgccggatcgcttctgacaatctatgttgtcagaagcgccactcgcccgaatcccccaatgaccgcctcaagtcccgatgacgcagtccttgatgtcctgatcgtaggcgccggcctgtccggcatcggcgccgcgcgccagctgcaaatgcgctgccccggcaagcgctacgccatcctggaggcgcgtgaggccatgggcggcacctgggacctgttccgctaccccggcatccgctcggattcggacatgtacacgctgggctaccgcttcaagccctggcgcggcgccaaggccatcgccgacgggccgtcgattcgcgcctacatccgcgaaaccgccgaagaggccggcatcacgtcacatatccgcttcggccatcgggtcatcagcgcggcatgggacagcgccgcagcctgctggacggtcgaagccgaacgcagtgcggaccgcagccggctgcgcctgcgcacacgcctgctctatgtgtgcgcaggctattacagctatgccgagggccaccggcccgaatttgcaggcgaagcgcaattccgcggcagcatggtgcatccgcagttctgggacgaatcgctcgactacgccggcaagcgcgtggtggtgatcggcagcggcgccacggcggtcacgctggtgccggccatggcgaaaagcgccgcgcacgtgacgatgctgcagcgctctcccacctatatcgtgacgcgccccggcgaggacgccatcgcccacaagctgcgccgcgtgctgccggagcggctggcctacgccgccacgcgctggaagaacgtgctgctgggcatgatgttcttccagctggcgcggcgccggccggaccgcgtcaggcagcgcctgatcggcatggcggcagcgcaactggcgccgggctatgacgtcggcacccacttcacgccccgctaccggccctgggaccagcgcctgtgcctggtgcccgacggcgacctgttccgcgcgatccgcgacgggcgcgcatcggtggtgaccgacaccatcgaccggttcaccgagaacggcatcgtgctggccagcggcaagacgctggccgcggatgtcgtggtggtggccaccggcctcaagctgaacatgctgggcgacattgcactcaccgtggacggccagccgcgccgccccgccgaatgcctggcctacaaggggatgatgctgagcgatgtgcccaacctcgtgctggccttcgggtacaccaatgcctcgtggacgctcaaggccgacctcacggccgagtacgtctgccgcctgctgcgtcatatggatcgccacgcccaccgcattgccgtgccgcgcgccccggctgacgttgagccgaccccgttcctggatttcacctccggctacgtgcagcgtgccgccaccgtgctgccccggcaagggcatcgcaagccatggcgcgtgcaccagaactacctgaaagacctgctggcgatccggcacgggcgcatcgcagacggcgtgttgcagttcgatgtcccgcctccctctcccctggcacaccgggcgcaccgggacggccaggacaccaccgacaacaacaacacggtgccggccgttgccgccagcgaggtgcaatcatgaccatcgtcctgaccgttttcgcggtgctgatcgggctgatcctggcgctgggcgcgtcgctgtatctgtacacgtggcgcaccgcgcggcgcatcgaagccgccatgccgccgcacggccgctttgtcgacgtgcccggcgcgcggctgcacgtggtggagcgcggccagggcccggcggtgctgctggtgcatggcctgtccggccagcttgagaattttggctacggcatgatcgggccgcttgccgagcatttccgcgtgatcgccgtcgaccgccccggcgcgggccactccatacgcaagccgggcagcgccgcggacctgccggcgcaggccgcagcgctcgccgcgctgtgcgacaagcttggcctggagcgtccgctggtggtgggccattcgctgggtggcgcgattgcgctggcactggccatccaccaccccgagcgcgtgggcgggctggcactgatcgcgccgctcacgcacccgcccaaggcgatctcgccggtgttccaggccatgaccgtgcccagcgcgtggctgcgccggctgatggcatggacgctggtggtgccgatgtcgattcggcgccgcgaagccgtgatggacatcgtgttcggcccggacccggtgccggacgacttcccgacgcgcggaggcgggctgctggcgctgcggccgcgccacttcctggccgcgtccgaagacctgatcggcgccgcgcagagcctgccggcgctgctgcaccgctacggcacgctgcgcgtgccggtcagtgtcctctacggccgcgaagaccgcatcctggattttgccgagcatggcgaagcgctcgccgccaaggttccgggcgccacgctgacattggtcagcggcgggcatatgctgccggtgaccgccatcgacaccagcgtcgatttcgtccgcgacgccgccgcccggctgcaagtccccgcgccggcccaggcgcaggtcgcctgatccacggagccccgcccatggccaccaccaccgcttccaacccctacaagcacaatgtcttcgccgcgttccaggccgttcgcaagctgatggcgaacggcaacgacacggagcaggtgttccgcatcatgcgcgcgctcaacgggccgtccatgccccgcaacttcaaccggctgctgagcacgcccgacgggcggcgcatggtctaccagcgcatcgagctggcggagcgcctgtccgatcccgcctacgtggccaggttcgcaccgggcacggtgggcgcggcctatcgcgcgttcctggaacagaccggctacagcgctgacgggctggccaaggtctcgaacctggaccaggaaccgttgatcgaggacgcctacatgtggttcggccggcgtacccgcgacatccacgacatctggcatgtgctcaccggctaccgggccgatgaaagccttggcgaagccgcactggtggcattcagctatgcgcagaccggcggcaagggctgggccttcatcgccatcgcggcgtcgctgaaaagcctgcgcgtgagcggcagcctggcctttgcgcgggccgtgctggaaggctaccggctgggccggcgcgcccgctggctgttgggcgaggactatgaaaagctgctgcacgaacccatcggcgcggcccgcgcgcggcttggcattgccgaaccccagcgctacctggcctgcaatcccgatcccctgcaggagtggacggcctgaagcgctgctgcgtgccccccaaaaaaaagcgaccacggccgggtcgcttttttgatggtgcgcagcgcgatcagacgatacggcaggcttcgtcgaacgacaggcgcgggccgcgcgggaacagcttgtcggcctcgccgtagcccaggttgcacaggaagttgacctgccacttgccatcggggaagaaggctgcgttgaccttgtcggcatcgaagccgcccatcgggccgcagtccaggcccagcgcgcgcgccgccaggatgaagtagccgccttgcagcgagctgttcatcagcgcgtcgcgggcgatcttctcgtcgttgccggcgtaccaggaacgggcgtcggcatgcgggaacagcttgggcagctggtcgtggaaggcggtgtcgaaggcgatgatggccgtcaccggcgccgaacgggtcttgtcgacgttgccggccgacacgcagtccaccagacgcgccttctcggcagcgctcttgacgaacacgatgcgcgccgggctgctgttggcagcggtcgggccgaacttcatcgcttcatagatctggtgcagcacggcgtcgtccacgtggcggtcctgccacacgttgtgcgtgcgggcttcggtgaacagctgcgccagcgcggcgttgtcgatctgggacatgcgcttctttcctgtacgggatttgagggaaggggcgattgtacccaacgctttgtgcgcgccacgacagcgcctttgagcaacccgttcaattcccttgcatatcggcgcgggccggcgccggcgcactgcccctgcgggtcagccacagcacgccggccaggatcagcccgccacccacggcctgcgccgtgccgatatgctcgcccagcagcagcgccgccagcaacacggtgaccaccggctccagcgtcgacagcatcgacgcctgcgccgcgcccagtcgctgcaggccggcgaagaaggtcaggatcgccagcaccgtcgacagcagcgcgatgcccgccagcgccagccagccgccggcagtggccgggaactgcggcggcgcgcccgcccccatccgcagcaggccgacggcgccgtagaccagcgccgccgcggtgcagatcaccgtggtggtggcaatcgggttgacgccagcggtcacgcgcgcgccgacgatgatatagaccgagtagatcaccgccgccgccagccccagcgcgatccccagcggcgagccctcgccgccgccgacggtcaggccggcgccgaccgagcacagcaccagcgcgatcaccgcggcggtggtcagccgctccttcaggaagatggccgccaggatcgtcacgaacagcgggtacaggtacagcagcagcgccaccaggctggcctgcgcatggttgagtgcgctgaagaagcagaacgactggccgacatagccgatgccgcccatcgccgccagcgccagcacgcggcgccacggcggcaggccgatgccgcgcgtgcgcatcacccaggccagtgccgcggcggccagcacgaagcgcaccagcagcagcccgtagacatccgcgccggccgcgtaggcaaagcgcgcgaagatcgccatggcgccaaaggcgctggccgacagcgcgatcagcagcacgccggccagcttgtcgcgggcatggtccggggcggtttgggcggaagcggtcatcgggcgggcgggaagtcggcgatcccgcattctacttggcgccgtctgcagcaaccggaccgccagcgcgggccgcggccctcgtttacaatgtcgccaccatgtttaatccctcacgagaagaagtccgccggttcttctgcgatgcctggcagaagcagctcacaggcggcgtgctgaccccgctggaagccatcgctgtagactggatcggcgagcaccccgagtaccacggcctgctgcgcgacaccgaaggtgcgctgtcgcaggactacacacccgagcaaggccagaccaaccccttcctgcacctgtcgatgcacctgtcgatctccgagcaggtctcggtcgaccagccgcgcggcatccgccaggcctatgaggcgctggcacgccgcctggattccccgcacgaagcgcagcaccaggtgatggaatgcctgggcgaaatgctgtggcaggcacagcgcaccggccagccgcccgacggcgaccactatgtcgattgcgtcaagcgccgcgccaaccgctaagtccggtacgcgtcacgcatcaagtgcagcgtacaattcgtcacaaccctccgatgggtgcgtggtagtctttgcgggtccgcattttccctagccgcgttgccgtcacatggcggcgcggtgcccgcaagccatgtcccgtattaccctcccccgccggcgccggctcgcgcccgccggccgcgccgttgccccgctctgcctgtcgctgatgctggcctgccccctcgccggccacgccggcgtggcgctgttgcagccgccgcgcgtgatcgacggcaaccagccgctcacgctgacgctggtggtcagcgccgacgacgccacgcgccgctaccgtattcccgacacgctcgaagtgaccgcctcgggcgacctgcaggcgccggtgcggctggtgctgtggcgcgaagtctcgggcccggccgtggtcaacctgcgccgcggcgagcaccgcgcgatccgctacacggtggcgctgccgccggccctgcgcggccaggtgcggctggatgccaccggcatcgacgccgcgccggtgctgttgacgctgaaccgcctgccgcggcccggtgaatccgccaccgctgagccgccggttgccggcaaggcgctggcagcgaacggcttggagccggccaccgaagccgccgtaccggtgaccccggtcaccaccgccgacgctgccgcacccgctccggccgacctgcgcgacagcgcccggctatcgttccatgacccgatgtatttcatggtcggcgcgcatgacggggccaacgccaagttccagctgagcttcaagtaccgcctcttccagggcgaagatccggcgtcgaagcgtctgttcgacaacctctacgtggcctacacccagttctcgctatgggacctgtccgagcagtccaagccgttccgcgacaccaactaccggcccagcctgttctattacctgtcggataccggcgtgcgcaacaacgccatcagccggctgtcgctggcggccggcctggagcatgaatccaatggccgcaacggcgacgactcgcgcagcatcaatacggtcttcgtcaagccgaccttctactttggcgaccagaacgactggcactggcgcgtcgcgcccaagctctacgcctacgtggaaaagggcgacaaccccgacatcgcccactaccgcggtttcatggacctgggcattgcctacgggcgcccggactcatgggagttctccgccacgctgcgcaagggcacgcgcaagtggtacggcagtgtcgacgcgcagctgacctacccgatggcgcggctgatccccggcaccgcgggctacctgatggcgggctacttcgtcggctatggcgagagcctgctggactacaaccacaagctgccgtggcagttccgcatcggctacgcgctgtcccgctgaacccactcagccggccagcggcttgccgctggccttgagccgcgcattggccaccgcggcggcaaactggccgtggccatgccagccggtggcgcggcccagcttcttgccgttccggaagaacatgaacaccgggatgccatgcaggccaaagcgccggcccagcccgggatgcgcgtagacgttggcatgcagccagcgcagttccagcgcgcggatcggttcggggttggccagcatggccttcttggccatctcgcagttgaagcagtcctccccccagaagaacacgcacaccagcgcatcgcccgcagcggcgatggcggcgtcgatgctgccgtcatcgacctcgcgcatgccgaatgcctcgaaggcgcggtggtcgaggtggggggccgggaatgtcgccgggccagcgcctggttcagtggtcatgctcgctccagaatgacaaacgcccgggccagccggcaccgggcgtcaggtcgcgatccaggacggcacgccgccgccccaggcggccttatttcggtgccgccaccgtcaccagagccggccgcagcacgcgctcggcaatggtgtagccgcgctggagcacggtcaccacggtattgggttcctggtccgccggcaccatcgagatggcctggtggcggtgcgggtcaaatttttcgcccaccgggttgagttcaacgatcttgcctcgctcaaaggcggcggccagctggcgcgcggtcagctcgacgccttcgcgcagcttggcgatatcgcccgagccgtcggccagcgcggcctgcaggctgtccatcaccggcagcaggttgtcggcgaagttctcgatggcgaacttgtgcgccttggcgacatcttcctgcgcccggcggcggatgttctcgccctcggcaacggcgcgcatatacaggtcgtaatgctcgcgcgccttggcttccagggcggccagctgggccgccacgtcgtccacggcagcggtttccggcgcgccggcctcctggctggcgttggccgcctcatcgccagcgggcgtaggcgtctgggtggttggcgtctgcttctgttcttccatgtcgatccgtatcaatgcattgtcgcggcccgccatgggcctggccgcgggtggtaaatcggcgcgtgttccgtgcaggtggtggcaaggcgcaggttttcaagagtggcgctggcgtgacgcggaaacacacggttacaaaggccaggcatatgcaatcgacgccttattgctttgctgcatcgcaatcactaagattcccagtaataaaaatgacaaaaatgccgggggttgtggagatggttcatctttgtgcctcttccggaaggttggccatgcataagctgccagtcgtgacactctgccttgtggccgcattggcggtcatgaccgtctttatctgcctttccggcgcattcaccccgcgcgatacggagtatggcagcggcaaggcggtgttcaagcactacatcgtccctatcgtcagccaggaagtcacgcaggaataagcgccacctgaccctggtccaagcgcgcggcggcagcgggggcttcccggtgccgccgcattgtcatttcagctcttcaggtggtcgatgcggcgccggtcccgcttggtcgggcgcccctggatctgcgcggacggctccggctgcaggcgccggcgctcggcgtcggccagccggcgcgactggctttcggcactttcctcgtacagcgtctgcgccaccggcgccggcccgcgcgccggggcaatgcctttcaccaccagttcccagcgctgctggtgcgcttccagcaccaccatgtcgccgggcttcacctcgcgcgagttcttgcatggctggccgttgacggtcaccttgctgcgctccaccgcttcggccgcgagcgagcgcgtcttgaagaagcgcgcgcaccacagccatttgtcgatgcgctggcgcgcatccggctcaaagtcgacattcatgccgccgctccccgggtctgggcgcgcgtgcgccgtgcttccagttcatgcggatgcggcgtggccagcggccagccctgcaggtgctgcagcgcgatctcggccatggccgcgacccacggatcggcgtcattcaggcacgggatgaagtggaaatccttgccgcccgcgaccttgaactcggtctgcccttccatggcgatttcctccagggtctcgatgcagtcggccggaaagccgggacagaagacatcgacccggcccgcgccgaccttgcccagctcggccagcgtcggcgcggtgtacggctgcagccattccgccttgccgaaacgagactggaacgtcacctggtactggcccggctgcaggcccagcgcctcgcccagcagccggccggtcttcaggcattcgcagtgataggggtcacccagctccagcgtacgccgcggcacaccgtggaacgacaggatcagcttgtcgccgcgggcaaagtccggcatgccgtggcgcgcccagtaggcgccgacctgctggtgcagcgccgagatataggccggatggtcatggaaatgcttgaccagccgcagctcgggctggttgcgccactggcccagcacccggaacacctcgtcgaaggccgtggccgtggtggtgccggagtattgcggatacatcggcagcaccagcacctgctcgcagccctgccggcgcagcgcctccagcaccgaggcgatcgacgggttgccgtagcgcattgcgcacgcgaccgtcacctcatggccgtgctggttcatcagccgctgcagcgcatgggcctggcgctcgctgtagaccagcagcggcgagcccgtcatatgggcctcgcgcagccagatcgattcgtatttcagcgccgaggcgcgcgaacgcagcggcaggatcaccccatgcagcagcggcagccaggccgcgcgcgggatctcgaccacgcgcgggtcggacaggaactccttcaggtagcgccccaccgccttgggcgtgggagcgtccggggtgcccaggttgaccagcaggatcgccgtgcgcggcgcgtggccgtgctggtaggccggttcgggagaaaacgtcatgtcgcttccgggttgacacggtgccgggatggcgccggtgcggcgcaccggcgattgccgcgctcggcaggaatggggccgcttgtcagaccagccagtctttgcactagttctggctcagggcgctggacagcaggcgcgcggtgatgtcgacgatggggatcacgcgctcatacgccatgcgcgtggggccgatcacgccgagcgtgccgacgatctggccgtcgacctcgtacggggcggtgatgaccgccatgtcttcgatcggcaccagccggctttcgccgccgataaagatctgcacaccctgcgcatggctggacacgtccagcagctgcagcaggctggtcttgtgctcgaacacgtcgaacaggcgccgcagcttgtccatgctggaggccaggtcttccacttccagcagcttgcgctcgccactgatgaagacgtggtcgtcgtcctcgtcctcggcgacgctgccggcctcgaccgcggcctgcatcagctgcgacatgtcgcggcgcaggtcctgcagttccacccgcaggtggccgcgcaccgcgtcgaagctcatgccggcatagtgcgagttgaagaagttggccgcctcgatcagctgggccggcgtgtacgacagctcggtctggatgatgcggttctgcacgtcgccctcggggctgacgatgatcagcaggatgcgcttgtccgacagccgcatgaattcgatctgccggaacgcctgcgcgcggcgcggcgtcatcaccacgccggcgaagtgcgacaggttggacagcgtgcgcgccgccgccgtgatcatgcgctgcggccccagctgctggccgccgagctggtcctggatctggccggtcagctcggccaggtcggcgttgcgctccagcggcttggccgtcagcatcgaatcgacgaacagccggtagccgcgcggggtcgggatacggccggccgaggtgtgcggactggcaataaagcccatttcctccagatcggacatcacattgcgaatcgtcgcaggcgacaggtccagccccgagtatttcgacaaggtgcgggaaccgaccggctgcccttcggcaatatagcgctcgatcagggtcttgagcagcgttttggagcgttcatccatgatgccccgattttacgcaagttttggaccttctggcggccggcctggcccgctcgctggcgcctgctgacaagcgtcatggcggtatggtctaatccacgcatgtccgcccccccgaaagccagcgccgtgcgcacttcgttcaagaccgtcgccctggtgggccggtactccactgccggcatcgaagggccgctggaggagatcgcctcttatatcctgcgcaacgggcaggacgtggtgttcgagcgcgaaacctcgctcgccaccgggctgaccgcctaccctgccctgtccgccgaggagatcggccggcaggccgacgtggccgtggtgctgggcggcgacggcacgctgctgggcatcgcccgccagctcgccggctatgacgtgccattgatcggcgtcaaccacgggcggctgggcttcatgaccgacatcgcgctggaagacgcgcacaccgtgctgcccgacatgctcgacggccgctatgaggccgagacccgcctgctgctggaatcgcgcgtggtgcgcgacgacatgaacatcttctccgcgctggccctgaacgacgtggtggtgaaccgctcgggcatctccggcatggtcgagctggcggtgtcggtggacggccacttcatgtacaaccagcgctcggacggcctgatcgtgtcgaccaccaccgggtccaccgcctacgcgctgtccgccggcggcccgatcctgcatccgacgctgtcgggcgtggtgctggtgccgattgccccgcacgcgctgtccaaccgcccgatcgtgctgccgcacgacgccgaggtcaccatcgaggtggccagcgcgcgcgacgccagcgtcaacttcgacatgcagtcgctgacctcgctgctgccgggcgaccgcatcgtggtgcggcgctccgaaaagaccatcaacctgctgcacccggtcggctacaactactacgccacgctgcgcaagaagctgcactggcacgaatacccgtccgaggacaaccgcctctgagccagtatcaagccgccctccaagcctgagcccgaacccatcggaccgactaccttccacgccacgatgctgcgcagcctgtccatccgcgatttcgtcatcgtcgatacgctcgacctggacttcaccactggcttcaccgtcttcaccggcgagaccggcgccggcaaatccatcctgatcgatgccctggcgctggtgctgggcgaacgcgccgatgccggcgtggtgcgcgaaggcgccccgcgcgccagcgtcagcgccaccttctcgacccacccggcactggatgcctggctggccgagcgcgagctcaacagcgaagcggaagacggcgtgcataccgtgctgctgcgccgcacggtcgatgccggcggccgcagcaaggcctttatcaacggcgccgccgccaccctggcgcagctgcgcgaagtcggcgaccagctggtcgacatccacggccagcacgcgcaccagctgctgctgcgccccgatgcgcagcggctgctgttcgacgcccacgccggcctcacccagcaggccggcgcggtggccgaggcctggcgcgcctggcgtgcctgcgtgcgccagcgcgaggcggtggaacaccagtcgcgcgagatgcagctcgaacgcgagcggctggaatggcaggtcggcgaactggacaagctcaacccgcagccgggcgaatgggaagagatccagtccgagtacaaccggctgtcgcatgccgccggcctgatcgacggcagccgcgccgcgctggacgcactgtccgaggccgacggctcggtgctgtcggcgctgaataccatcgtgcacaagctgcagcagctggccgatgtcgatggcgcgctgcgcgacgtgctggccgcgctcgagcccgcgcagatgcaggccgaggaagccgcgcactcgctcacgcgctatgtcgaccggctcgaactcgatcccgagcggctgcaggcggtcgacgaacgcatgcaggcgctgcacgccaccgcgcgcaagtaccgcctgccgcccgagcagctgcccgacgagctggtggcccgccgccagcagctggacgacctgcaggccgcgcaggacctgaacaaggtgatggcgcgcgaggccgcggccaaggccgcctacctgaccctggcgcagcatctcagccacgcccgcaagcaggccgcgcaggcgctgtccgccgcggtcaccgacgccatgcagggcctgtcgatggccggcggcagctttgtcgccgcgctcaatgcgctcgacgaaggccagagccacgggctcgagcaggtcgaattcctggtcgccggccatgccggcgtgagcccgcggccgctggcccgggtggcgtcgggcggcgagctggcgcgcatcagcctggcgatctcggtgatcaccagcgaagcctcgcccacgcccacgctgatcttcgacgaggtcgataccggcatcggcggcgcggtggccgaggtggtcggccggcgcctgcaggagctgggccgcgcgcgccaggtgctgtgcgtgacgcacctgccgcaagtggcggcgcaggccggcacgcacctgctggtgagcaaggaaaccaccgatgcgggcgacggttcggtcacgcgctcgcgcatcagggtgctggaccccgccgggcgcgtggtcgagaccgcgcgcatgctgggcggcgccactgtcaccgccaccacgctgcaacatgcggaagaaatgctggcgcaaggcatggccggcggccagggcagccagcccgcgcgcggtgcgggcggcaaggatggccggcgcagccgccgcgccgccggctgacggccccgcccgccccgcacgtgcgccaatccatacactgacaggagcttcaccatgacccgccaagcgcaagccggcctccggcaacgaccgcgcgcatcgctgcgcgccgtgctggccatcgccaccgccgcatcggccgcactgctggcgctgtccgcctgccaggcccagcccaagtcctcggccccgccgccgggcagcatcagcgatgaccgttcccttggcgacatcatggtgcgcttcaagccgcccgcggtgaacctgtcggaggacgccggcaagctgctggccgggatcaagggcccgatccgctatgtggtcaagcgcccgatgtccggcggcgtctggctggtcaccgcgatctcgccgtcggcggatgccaccatcgaccaggcggtcgaaaccctgcgcgccacgccccgcatcgagaccgccgagcccgaccgcgtgctcaagcctaaccgcaacattcccaccagccgtgacatgccgcagagctgagcccgactgcaggacggttcttaagccttcggtcgcccttgcgcaacgacgctgaatcgtattcgctacataacaagcccccgcgcgctacgccccaggaggtatgcatgccgcaacccgcgcagtccgacttccgtagcagccccgtggcccgccgctggcgggccatcgtcatcgccgccgccgctgtgtgcggcgcaataccggccagcgcggcactggctgccggcgtccatgccgcacccgcctacaccggccagatcatcgtgcgctggcgtgacggcgccgatggcacaagcaagacgcccgcagccgcggcggatgcgctcaagcagctgagcgcgcgcaccggcattgccgtcacggcgcgccgcgccatgggcggcaacctgcaactgctgcaggtccccgacgcactggcagccgacccggaaggcgcggcggcccggctgcgccaggacccgcgcatcgccgatgccgtgcccgaccgctggctgaagctgcacgacaccctgcccaacgattccgagttcatctcgcgccagccttacctgatgggcaccggcacggcggtgggcggcgtcaacctgccgcgcgcgtgggaccgcagccgcggcagcagcggcgtggtgatcgcggtggtggacaccggcatcctgccgcaccccgacctggcggcgcgcgtgttgcctggctacgacttcatcagcagcagcaccatttccaatgacggcgatggccgcgacgccgatgccaccgatgccggcgacaacgtgacagcgggtttctcgtgcccgggtggatcgccggccccgacgaccgagcccaacagttggcacggcacccgtgtcgccagcgtgctgggcgcgctgaccaacaacgcgcaggacatcgcgggcgtcgactggaacgcgcgcatcctgccggtgcgcgtctcgggccgctgcggcgcgctgctgtccgataccgtcgatgccatgcgctgggccggcggcttgtcggtacccaacgtgccggccaatccgacgccggcgcgcgtggtcaatatcagcctcggcggcggcacctgcagcagcattgagcaacaggccgtcaccgacctgaacgcgcgcggcgtggtggtggtggccgccgccggcaacgagcgcggcgcggtggaggcgccgggcgactgcagcggcgtgatcgcggtcacggcgcatgccaacgacggcgagaatgccagctatgccaatgtcggcccgcaggtcgcgatcagcgcgccaggcggcgggtgtggcaactcgcaggtagtcaatgggcagtgcacgaccgcgccctcggtcattcgcaccctgaacaacgatggcaagactggcctgggcaactatgtggtgacgtcatccgcgggcaccagcttcgccgcaccgatggtctcgggcgtggtggccatgatgttcgcggtcaatggctcgctgaccccggcccaggtcaccgcggcgctgaagtcttcggcacgcccgcatccgtccggcacctattgcaccaccaatccgggcgtctgcggcgccggcctgctcgatgccgacggcgcactggcggccgcggcgggcatgccaccggcgcaggctgcgccggcaccggcctcgggcaacggtggtggcggtggcggcggcgccgttgcgccctggaccgcggtgctgctggcgctgtccggcctgctggccttcgcgctgcggcgccgcatgtaagcccggcgcctggtcggttcaggcgtcgtcgccgcgggccgggcgccgcgccagccaccactcctgcaagacccagcacagcaggccggcgacggcgccggccgcgtgcgcgacgcgcaccacgccaaaaccccaggccggatcgaacaccaccggcgccagccacgactgttccacccagaccttggccagcacgcccaggcacagcagcacgccggtgacgcgcgccaggcccgatgcccgcaacagcccgagcgcgccccacagggccagcccgtgcaaggcgcctgagagcccgccataccatgcaatcgccggcacgcgcagcagcaccacctgcacgccgatgccgcaggcaaccagcaccagcaacagggtgcgcgcacgcgccacgcgcgcggcgatggcaagcacgccggtggcggccagcgcgtcggccagccagtggtgtccgtccaggtgcacccacatggcggtggccaggcgccaccactggccgtccagccgcaccgcatcgcgcaggtagaggccgtgcgcatgccaccacggcatgaaggtgaaccaggccgacagcgcccacaccagcgcgatcgccgccagcagccccggccacgatgcgccggcgggtgccggcggaactgccgcgtcaggcctcaccgaacacggcctgccacagcgcgcgcacctgtccggtctgctgcgccaccgactcgggcgcgacgcgcgcatgcgcctgcccctcgagccgcagctggtgctggcgcgcgcggaacagccggtaggcatcgcccaccgccagtgccagcgtggcgtcgatcaggcccagctcgcccgctgcgcgcagcagcgcgatattgcccgcgttgcgcgtcagctgcgggtgcgcccggctgtgcagcagcaccaggtactgcaccgtgaattcgatatcgaccatgccgccgcgatcgtgcttcaggtcgaacaggtcggtcgggttgggatggccttcggcgaccttgcggcgcatctgcatgatctcgtcgcgcagcgcggcggcatcgcggtcctggcacagcacctcgccgcgcagcgcctcgaagcggtcgccgatggcggcatcgccggcgcagaagcgcgcgcgcgtcagcgcctggtgttcccacacccaggcggtgttgtcgccttcgcgcagctggtagcggcggaacgcctcgaagctggtcaccagcaggccggccgcgccgttggggcgcagccgagtgtcgacgtcgaacagcgcaccggcggcggtatggctggtcagccaggtgatcagccggcgcgcatacgcggagtagacgtcaggcgcacgttcatggtcatcgtcgtacaggaagatgatgtccaggtccgaggcatagcccagttccttgccgcccagccggccgtaggcgatcaccgcgaagcgcggcgtgtcgcggtggcgcgtggccagctggcgccagaccgtttccagcgtggcctcgagcatggcatcggccaggtcggacaggcggtcggccacctgctccaccgtcagcatgccctgcaggtcctgcagcagcacgcggaaggtctcgacatgatgctcgcgccgcaggatgtccatctgctgctcgatctggccttcggcggccagcagccgctcatgcaggcgcttgcggaaggcggcccagtcgggcgcgccggccagcgcatcgctgtcgagcagttcgtccagcagctgcggatgccgcgtcaggtaggccgcggcccagcgcgaggcatgcagcgtctgcgcgacgcggtccatcgcctgcgggtattcggacagcaacgacaggtaggaggcgcggcggctgatcgcctcgaggaagtcgataaagcgcgcgatggtgctgtcggcatcttcctggcgcgcggccaggtcgagcgcgcggttcaccagctggtcgaagcgcgcgcggctggactcggacagcgcgcggtagcgcagcgacgaggcgatcgcgcgcagccggtccagcagcccggtgcagtcggtaaagccggcggcctgcaggcgctggcagggcgcggcgttatcgccgcaggccgcgtcgtcctgcttctgttccgggttgtcctgcgcttgcgcggcgttgtcgtcgaacacaatgcccggccacagcgcttcgcacggggcggcatcgggatccgagaaggtggcctcgaactgctgcgccaccggctcctgcagcgccgccaggcgcgccagcagttgctgccagtcgtcgcaacccatcatccgcgccaccgccagctgttcgtcgggcgaagtcggcaggtggtgggtctgggcgtcgtcgcggtactgcagccggtgttcgagctggcgcaggaagcggtaggcatcgccgagctgcccggcctggccggcgggaagcagcccgcgctcgaccgccaccgccagcacttccagcgtcgggcgcacgcgcagtgccgggtcctggccgccgcggatcagctggaacacctgcgccatgaactcgatctcgcggatgccgccgcggcccagcttgatattgaacgaccgctggttgacgccgtgccccgccagcccgccgctgcgcttggcggcctcgctgcggatctgcgcgtgcagcgagcggatcgcggcgatcacgccgtagtccaggtagcggcggaacacgaagggcgtggtcagccgcgccagcaggccggcggtgcgctgcgcgtgcggcgtgtcgagcgccgacaccacgcggcccttgatccaggcatagcgctcccactcgcgcccctgcaccaccaggtattcctccagcatgccaaggctgcacgccagcggtccggcgtcgccgttggggcgcagccgcatgtcgacgcggaacacatagccgtcggcggtcacctcggccagcaggttgatcagccggcggccgagacggatgaagtactcgtggttggacaggctgcgcgagccgccctgggtctcgccgtcctcgtcatagaggaagatcaggtcgatgtcggacgagacattgagctcgcgcccgcccagcttgcccatgcccaccaccaccaactcctgcacctcgccgctttgggcgccgaccgggcggccgaaggtggcggccaggtcgtcgcccagcatcgccaggccgtgctggatcgccagctcggccaggtcggtcatggcgccggtgacctcgcccagcgtggccaggccgcgcaggtcgcgctcgatcaccgcgcacatcacttcggcgcgcagacggcgcaggctgcgcttggcggattcctcggcatcggccgagggctcgtgcagcgcctgcagccgcgcctgcatccaggcgcgcgtcagcggctgggcggctgcggcggccaggatggccggcaaatccggccgggcctgcaccacgcggcgcgcgtagtgcgaatacgcagccgagtacaatacgtggccgcccgcgtggccagcctcgtcagccggctgcagcgcctgcgccgcggtgatggcgaaggcgccggcagccatggtgccggcgcccggccccggctgcgggtccgccggattggccggatccggtgtggcgcgcgcgccatgttggtcagcagcgtcgccagcggcggaactcgtcggttcagaggcagtcattccagtatttgaaatgcgagaaaaggtgcggcccgtggttggtcccgcggttcacctgctcgcgtcctgttgtccgcgcagcgggcgcgccatcgtggctattgtcgctttgggtgcgcgcagcttgcgcgttcttgtttcagccggccgggcaccagattggagagcggctagtattgtcggataatctgcgcatgtccagccgcgccccacaacccgctgatggttccccccccaatggcggcgcgggcgggcaggacgccgcctccaccctggccccgccacaccccgtgaatcccccggccaacgatgccaccagcgcccggcgcaacgattccgcccgcgcgcacgccggcgcgttcctgcgcgcctgcacgcgcggcgtggcggcagccgtgcgccacccgttctggcgcgggctgggccgcgcgctggtgcggctggcgctggtgctggccgcgctggcgctggtggcgggcctgctgatccgcttcgtgctgtggccacaggcgtccaccgcgcgccagtggctggaagaacgcggctcggtggcgctctcggccaaggtcagcatcggcgcgctcgatacctactgggacggctggcacccggccttccgcgcccgcggcctgcgcgccgtggactccggacagcgcgtgctgcttgcggccgccacgctcgacggcaagctggcgtggcgctcgctgttcagcatgaacctgcagttcgtcagcctgggcgcgaccggcaccgacatcctggtgcggcgcacgcccgagggccggctgctggtcggcggcatgctggtggacgcgaccggcggccagcaggacgacgatcgcttcctgggctggctgatgtcgcaggggcgcgtggcgctgtccgacggcaagctgcgctggctggacgagaaggcacgcctgccccagctcgatatcggcgagatccgcctcgacacccgccgcgacggcgcgcgccacacggtgacgctggaagcgcgctcgccggcgctgggcccgagcccgctggtggtgcagtcctccttcagcaacgactacctgcacagcgccggcaactggcgctactggaccgggcaggccagctgggaccttggccagctgcagctgccggtgctgcagcgctacctggcgatgttcgagcgcgtcgccagcggcaccttcagcaccgacggcagcattgaattccgccagggccgcatcgtgcgcagccagacgcggctgcgcgccagcggcgtcgacctgcagctggccggcgcctccgccccgctgcgcctggccaatgcgcaggccttcctgctacaccggaccgagcgcgacggcagcaacctgctgaccgtcgacaccctgctctggcaaccccagcccgccagcgacgacgagggcacccccgccgacagcacctggcgcgaaggcatgcgcaaggtcaccctcggctgggcctccggcaaggacggcaccctgcgcaagttctcgctcaaggcgcccacgctggacctgaacacgctgcgcgcggtgtccagctcgatgccgctggacaccgcggtgctgcgccggctgcgcgcgctgcagccagctggccacatcgacaacctcaacgtgagctggagccgcgagcgcgccggcatgctcgagcgcggcgacggcaagctgcgctacagcgtgcagggcacgctgcgcgacgtctcggtcaacggccagccggccgtgcccgcggtggacgccagcggccacccccggctgggcacgcctggcttttcgcacctgtccggcaccttctccttcgatgaccagcagggcaatgcccgcttcgaaggcaacggcgcggcactggtgctgcctggcctgttcgaggagccgcggctgccgttcgaccagatcggcggcgaagtgcgctggacccatgccggaggcaagctcgcggttacgctggacggcgtgcgctttgccaatgccgatgcggccggctcggtgcgcggcacctggcgcgcaggcggcgacggtgtatccggcatcgccgacctgagcggtgaaatgacccgcgcccaggtggcgcgcgtgccgcgctacctgccgctgagcattccggccggcacccggcactacctggccggtgcgctggcgggtggcgaagctgccggcgtgagcttcgtgctgcgcggcgacctggcgcatttcccgttccatgccccgcacgagaaggccggcgagttccatgtcgaggtgccgatcgaacacgtcagctaccagatcgccccgcacgagaccgccagcggcaccaccaccggcgcgcaggcgtggccaaccttcaccgacatttccgggcgggtcgtgttcgaccgcggcggcatgacgttcctggcaagccgggccacggtccacgacatccccggcgtcacgctgcaggacgtcaagggccgcatcgatgaccttggcccgcacggcaagctggtgatcgacggcggcgccagcggaccggtgcagggcttcctgcgctacatcagtgcttcgccggtgcgcgaatggaccgggcacgtggccgatgcggcgcaggcccacggcaacggcgagctcaggctcaagctcgacatgccgctggaacacgccaatgccgccaaggtggacggccgcttccgcttccccggcaacgatgtcgtgctcagcccgcagctgccgcaactgggccatgccaacggcaccatcacattcaatgaacacggtttcgggctggagaacatgcgggcccgcttcctcggtggcgagatccggctcggcggcggcacccagccggacggcgccacgcacgtcaccgccagcggcagcgtctcggccgccgggctgcgcgaggccgccgcgggctcggcgctggcgccggtggccgcgcggctcgaaggcagcaccagctacagcgccgtgatcgccacgcgcgagcgccagctgcaggtgcagttgagctccgaactcaatggcatggcgatcggcctgcccgcgccgctggccaaggccgcggcgcaagacctggcgctgcgcgcggacctgcgcccggccagcgccccggaccgcgccggcaccagcgagctggtgctgcagctgggccatgcgctgaacgcgcgctacctgctgcgccgcgaccagggcggcggcatcgacgtgctcgccggcgccatcggcatgcagcaggcgccgccgccgcccgcggccggcgtcagcgccgcggccaccttcgaccagctcgatatcgatgcatggcgggcggccttcggcggcggtgccggcagcgcgggccccgccgcggcgccctcacccttcctgcctggccgcattgcgctgcgcgcgcgcacgctgcacgccatgggccgcacgctcgacgaggtggtgctcgacgccaaccgcgaagccggcggctggaacgccaggatcgactcgcgccaggtggccggcgcggtgcagtggcgtccggccgggccctcggccaccgggtcgctgcaactgcgcctggcgcgcctgaacgtgcccgatgccagcgacgagcgcaacgtggtggacgcgctcgccagcagcatcgacgagctgcccgcgatcgacctggtggtcgaccagttcatgctgcgcgggcacgacttcggcaagcttgaagtcaaggcccataccggcaccagctccgccgatccggtctggaccctggaaaagctgcagatcgagcaacccggcgccaccctgaccggcagcggcagctggcgcgtgccgcgccagctgcgcgccgacgccaatgccgagcgccgcaccctgttgtccttcagcatcgacgtgcgcgatgccggcgccacgctggaacggttggggctggcgcacacgctgagcgacggcaagggcaagctcgaaggccgcgtggcctggcgcggctcgccgctgtcgatcgactacccgacgctgtcgggcaagctgtcgctggacctggagaatggccagatcctgagcgtggagcccggcgcggcgcggctgctgggcgtgctcagcctgcaaggcctgctgcgctttgccatgctggacttccgcaccctgtcgggccgcgggctggtgttcgaccgcattgccggcactggcacgatcgagaacggcgtcggcacgatccaggacttcgagctcaggagcccgcagatcatcgccagcatgagcggcaccgccaacctgctgcgcgagacccaggacctgcgcgtggatgtggtgccacgcatcaacgccacctccacctcgatcgcggccgcctttatcaacccggtgctgggaatcggcacgctggccgcgcaactgctgtttgccgacgagttctccaaggtgttcacccagcactaccgcatcaccggcagctgggccaacccgcagatcggcaaactggaggacaataaggcgcaagccccgaccttccagaaccgcgcggaccccgccctcccgcgctgaggaaaacaacgccgcctatgactgcaaccgccgcctccgccccgttccgcgttgccgccgtccagaccgtgaccggcacctcgctcgatgccaacctggcgcgcgccgacgcgctgatcgccgaggccgcagccggcggcgcggcactggtgctgctgcccgaatacttctgcatgatgggccgctccgaatccgacaaggtggccgtgcgcgagcatgacggcgacggcccggtgcagcagttcctggccgatgcggcacgccgccacggcatctggctggtcggcggcacgctgccgatgtggtgcgacgacccggcgcgcgtgtacaacacctcgctcgccttcaacccgcgcggcgagcgcgtggcgcgctatgacaagatccacctgttcggcttcacccgcggcactgaaagctacgacgagtcgcgcaccatcctggccgggcgcacgccggtcagcttcgacgcgccctgcggccgggtggcgatgtcggtgtgctacgacctgcgtttccccgagctttaccgcggactggccgccggcgacggcaccagcttgattctgatgccggccgccttcacctacaccacagggcaggcgcactgggagatcctgctgcgcgcccgcgccattgaaaaccaatgctatgtgctggccgcggcacagggcggcaagcatgagaatggccggcgcacgtggggccattcgatgctggtcgatccgtggggcgaggtgctggcaacgctgcctgagggcgaaggcgtggtcggcggcgtgatcgatcccgcgcgcctggccgaggtccggcagaacctgccggcactgcgacaccgggtgctgtagcatgtacgcaatcgcggcagccttcaccggctcccgcccggagaattttttgccgcgccggccgcaagccggcgcgtccccaggaagaaaggacatctcatgaacgccggcgatctcggaatccgcaacctggccaccgcgcagcaactgctgctggcaccgtacggcctggacgaggccaagctccagcgcgtgctggccgatatcttcacgcacaaggtcgactatgccgacctgtacttccagtacacccgcaacgaggcctggagcctggaagaaggcatcgtcaagtcgggcagcttcagcatcgaccagggcgtgggcgtgcgcgcggtctcgggcgaccgcaccgccttcgcctattcggacgacatcagcctggcggcgctgtcgcaggccgcggcggccacgcgcaccatcggccgtgccggcaacggccgcgtcaaggtggccggcgagctggccacgcacgccgggcgcaacctgtacgcgcccaacgacccgctcgactccatgagcgcggccgagaaggtggcgctgcttgagcgcgtcgagcgcatggcgcgcgccaaggatccgcgcgtggtgcaggtgatggcaggcctggccggcgaatacgacgtggtgctggtggcgcgcagcgacggcgtgatcgccgccgacgtgcgtccgctggtgcgggtctcggtcacggtgatcgccgaacacggcgggcgccgcgaggtcggctcttccggcggtggcggccgctatgcctatggctacttcaccgacgagctgctgcagaaatatgttgacgaggccgtctcttcggccctggtcaacctggacgcgcgcccggccccggccggctcgatgaccgtggtgctgggcccgggctggcccggcgtgctgctgcatgaagccgtcggccacggcctggagggcgacttcaaccgcaagggctcgtcggcctttgccggccgcatgggcgaacgcgtcgcggccaagggcgtgaccgtggtcgacgacggcacgctggccaaccgccgcggctcgctcaacctggacgacgaaggcaacccgacccagtgcaccacgctgatcgaggacggcatcctgcgcggctatatccaggacacgctcaacgcgcgcctgatgaagatgccggtcaccggcaatgcgcgccgcgaaagctatgccgcgctgccgatgccgcgcatgaccaacacctacatgctcaacggcgacagggatccgcaggagatcatcgccagcgtcaagcgcggcctgtatgcggtcaacttcggcggcggccaggtggacatcaccaacggcaagttcgtgttctcggcgagcgaggcctacatgatcgaggacggcaagatcacctacccggtcaagggcgcgacgctggtcggcaacggcccggaatcgctgaaggatgtcaccatgatcggcaacgacatgcgcctggactcgggcgtcggcgtgtgcggcaaggaaggccagagcgtgccggtgggcgtgggccagccgacgctgcgcatcgagaacatgacggtgggcggcaccgcctgaccagtccggcgatgacgaagacgggaccctgcggggtcccgtttttcacgggatcgccccggccttacggccgcacttcatacaccaggttgaacggcgtctgcgccgcgcggcggaaactgctgaagccggcctgctcaaccactgcgcgcatgcgcgcctcgcccgcctgcgcgcccaggcacaggccgacttcctgcgcgcgcgacgctggcgtgcaaatgaaggtggacgcggaatagaacacccggcccagcgggttcaggttctgctccagcgtgtcgttggcaaacggttccacgatcatccaggcgccatcggcacgcagggtctcgcgcacgtggcgtgccgcgccgaccggatcgcccatgtcgtgcaggcagtcgaataccgtcaccaggtcatagtccttgccgccgtagtccttggcggtggccacttcgaagcgcacgcgctcggtcatgccggcgcggcgcgcggcttcggccgcatggcgcaccgaaggctcgtggtagtcgaaaccgacaaagcgcgaggccggatacgcctgcgccatgatgatggtcgacgcgccgtggccgcagcccacgtccgccaccgatgcgcccgccttgagccgcgcctccatgccgtccagcgcgggaatccattccgaaaccaggtgcgccgcgtagcccggccggaagaagcgctcggtgccgtggaacagcgcgggatcgtgctcgtgccagcccagcccgcggccgttgcggaagatatcgatcaccttcgggatggcgcggaactgcgccaccgcgatctggaacgcgcccgggatgaatgcgaggctgccctcctgcgccagcgcataggcctgctcttcgttcaggctgaactgcccggtggccgggtcatagtcgacgtagccgctggccgcctgtgccgacagccattcgcgcaggtagcgcacgtctgtatgggtctttgccgccagcacttcggcggtcattgctttttccgccatggccttgtacaggccgagttcatcgcccaccaccacggtcgcggcatgcatcaccgcgccgatatcgttgacgaatttttccatgaaggcattcagcctcgcttcatcgacgctcatgatgcacctccccgtgctcactgctccccggttccaatatagccccgggtatgtcggggaaagccgaaaagcagtggcgggacaaggcttggcaaggcgccgggagatgcgtacgccagcgcaccgcatggcctcgtcgacacttgccaattctggcaaaaggcgctataaagatgcttcgcggcgcgacaggcaactgacgcacgccgaaaattgaccggccggcgcgcaatttcctgcctttctgctacgcagtgcagcataaattcggcgctcacgacgataatcgattcaagctgacccaagccaaagcctttttccgccatgtccgctaagttttacttttacttttttagcgatctcacaccgctggcggatagggagggacggctgtaggcagcgccccgaatacaaaaaagaccgccagcgaccctggcggttttttttatacctgtttgtttccccacccactcacgacctcacaagaatcccggagccatcatgctgaagaacaccgacgacctgcgcattcgcgaactcaaggaactgctgccgcccgcgcacctgatccgcgagttcggctgctccgaacaggcttcggacgtgatctacggcgcgcgccaggccatgcaccgcatcctgcacggcatggatgaccgcctgatcgtcatcatcggcccgtgctcgatccacgatacccgcgccgcgctggactacgccaagctgctcaaggtccagcgcgaccgcttcgccggcgagctggaagtggtgatgcgcgtgtacttcgagaagccgcgcaccacggtgggctggaaggggctgatcaacgatccgcacatggatggcagcttcaagatcaacgatggcctgcgcaccgcgcgcgaactgctgctgaacatcagcgagatgggcgtgcccaccggcaccgagtacctcgacatgatcagcccgcagtacatcgccgacctggtcagctggggcgcgatcggcgcccgcaccaccgagtcgcaggtgcaccgcgagctcgcctcggggctgtcgtgcccggtgggcttcaagaacggcaccgacggcaacgtcaagatcgcggtcgatgcgatcaaggccgcgtcgcagccgcaccatttcctgtcggtgaccaagggcggccactcggcgatcgtgtcgacctcgggcaacgaagactgccatgtgatcctgcgcggcggcaaggcgcccaactacgacgccgccagcgtgcaggaagcgtgcgacgccatcgccaaggccggcctggcctcgcgcctgatgatcgatgcctcgcacgccaacagcagcaagaagcatgagaatcagatcccggtgtgcgaggagatcggccgccagatcgccagcggcgaccagcgcatcatcggcgtgatggtggaatcgcacctggtggcgggccgccaggaccacgttcagggccagccggtcgagcagctgacctacggccagtccgtgaccgatgcctgcatcggctgggacgactcggtcaaggtgctcgagggactggccgaatcggtgcgccagcgccggctggtgtcgggcagcggcaactgatagcgccgcggggccagggccccgcgctcgcgcacacaacaaaaaagccgcttccagggaagcggcttttttgcattggcgcggcggcggccgcgcgttcttacttcttcagcaccaggtcgccaggcagcgactcgatgtaggcggccatgtccttcagctccttgcgggtgaacgggcgcggcttgccgtccttgtcggtcacggccggattggcgttgacctggcccgccatgatggcattggagcggcccaccagcgggttgcccgacacctggtacgacgccagcgcgtggtacaggtagtcggcgtgctggcccgccagcttggggtagtccggcgagatcggggcgttcatgcccgcgccgtggcaggccacgcaggcacccttttccaccagcgccttgccggcggcaaggtcggcggccgaggccggcatcgcggcagcacccagcacgagtgcgccgagcgcgaacgaaagcgtcttgagcgtattcatgaggggtctcttacttgagggaattgttctgcgtgccggccttctgctgcgagtagtaggccgccacgttggcgatgtcctgctcggtcagcgtcgcggcgatgccgcgcatggtcgggtgcttgcgctcgcccttctggtaggccttgagcgcgttctcgatgtacttggcgctctggccgcccagcagcggcacttcatagatttcggggaatgacgcacggtagcccggaatgccgtggcagccgatgcacattgcaaccttgtccttggcagcgtctccattgcccttgacttcctgtgcctgcgcagccgttgcagccgcgcccagcaccaccatcgtgaggagctttttcattgtctttgcggattggaagttaaaccgtgtgacctgccctgccgggcggagacggtttcagaatgctgctgcggggaaaaccagggcagccggagggattgccgaggtgcaacccgccagacatgtcgcatccggtctgttgccgggatgtggaacaccattctggaaccacctctcgcaatcgccgcgacccggaagggccgctgggacttctgaacgcggactgccggatgctgggagaactggacgtgggggcgcgtcaaaccgccgcattgtaccgcagccggcacctgccagtccagcaaccggcccgggccgccggcggcctgtcagcgcgccccaacacgaaccgcaaaggtcttttatactggctgatcccgggaatctgcacgaccgttcgcgaatgctgccgccagcagcgcgcgggcgccctgcaccggaccccgtttccataatgaaagcgcgcatgacagcgcgaagagaccgcgccaagcacgccaacccggccctcgatccgaggccgtcacctcaggttgcctcatgtcaaacatcgccaacgcttccgcccaagcttccatcgcccagcaggcccgtttcgagggcaccgaccagtatgtcgccaccgacgacctcaagctggccgtcaatgccgcgcgcacgctgcagcgcccgctgctgatcaagggtgagcccggcaccggcaagaccatgctggccgaggaagtcgccgccgcgctgggcatgccgctgctgcagtggcatatcaagtcgaccaccaaggcgcagcagggcctgtacgagtacgacgcggtgtcgcgcctgcgcgactcgcagctgggcgacgaccgcgtccacgacatccgcaactacatcgtcaagggcgtgctgtggcaggcctttgaagccgacgagcaggtcgtgctgctgatcgacgagatcgacaaggccgacatcgaattccccaacgacctgctgcgcgaactcgaccgcatggagttctacgtctacgagacgcgcgaactggtcaaggcgaagcaccgcccgctggtgatcatcacctcgaacaacgagaaggagctgcccgacgccttcctgcgccgctgcttcttccactacatcaagttccccgacgccgacaccatgcagcagatcgtcgacgtgcactaccccggcatcaagcgcgagctggtggcggccgcgctggaatcgttctacgagatgcgcaacctgccgggcctgaagaagaagccgtccacgtccgaactgatcgactggctcaagctgctgatggccgaggacatcccgcccgaggcgctgaagagcccggacaagaaggccgcgatcccgccgctgcatggcgcgctgctgaagaacgagcaggacgtgcacctgttcgagcgcctggtgttcatgaaccgcgccaaccgctgaggcattgcccgccatgactgcgttcgtcaaacccgtcacgctggtgggccggcacgtcacgctggagccgctgcgcgccgagcatgccgagggcctgcgcaacgcctgcgccgacggcgagctgtggaagctctggtacaccagcgtgcccgcgcccgagcgcatggaggccgagatcgcgcggcgcctggcgctgcaggaacagggctcgatgctgccgttcgcggtgcgcgatgccgccggcgagctggcgggcatgaccacctacatgaatatcgacgcgaccaaccggcgtgtggagatcggctccacctggtatgcgcgccgcgtccagcgcacgccgctgaacacggaatgcaagctgatgctgctgggccatgccttcgaccatctcgactgcatcgccgtggagttccgcacgcactggatgaaccagcagagccgcgccgccatcgcgcgcctgggcgccaggcaggacggcgtgctgcgcaaccaccagcgcatgccggacggctcgttgcgcgacaccgtggtgttctcgatcatcgccagcgaatggccggccgtgcgtcaacacctgcaattccagctcgaccgtccgcgctgaagcggccgccgactgatagcgaggcatcatgctgatcgatttcttcttctcgctgcgccacgccaagctgccggtctcggtcaaggaatacctgaccatgctggaagcgctcaaggcgcaggtcatctcgccgtccatcgacgagttctactacctgtcgcgcatgacgctggtcaaggacgagaagcacttcgacaagttcgaccagaccttcgccgcctacttcaagggcgtcgagagcctggtcgactggaagtccgacatcccgctcgactggctgcagaagacgctggagcgcgaactctcgcccgaggaaaaagccaagatcgaggccatgggcggcctcgacaagctgatggagcgcctcaagcagctgctcgaggagcagaaggaaaagcacgagggcggcaacaagtggatcggcaccggcggcacctcgccgttcggccacggcggctacaaccccgagggcgtccgcatcggcggcccgtccaagggcaaccgcaccgcgatcaaggtgtgggagacacgcgcctacaaggactatgacgaccaggtcgaactgggcacgcgcaatatcaaggtggcgctgcgccggctgcgccgctttgcgcgcgaaggcgccgacaccgagctggacctggacgacaccatccactccaccgcggccaacgccggcctgctcgacatcaagctgcggcccgagcgccacaacaaggtcaaggtgctgatgctgatggacgtgggcggctcgatggacgaccacatcaagcgcgtggaagagctgttctcggccaccaagaccgagttcaagcacctggagtactactacttccacaattgcctgtacgactacgtgtggaagaacaaccgccgccgccacgccgagaagctggccacgtgggacctgctgcacaagtacacgcccgactacaagatcatcttcgtcggcgacgccaccatgagcccgtacgagatcctgcagccgggcggctcggtggagtacaacaacaccgaagccggcgcggtctggctgaaccggatgaccgagcagttcccgcacttcgtctggctcaaccccgagccggaagggctgtggcagtaccggcagtcgatcacggtcatcaaccagctgatgaagggacggatgtatccggtgacgctggccgggctggaacaggcgatgaaggtgttgtcgaagtaaggcagcgctggctgctgaagcgcgtaagtggcggcatcgacatgccgccttttttcatgggtcagtccacggtgatgcccgcctgccggatgaacctgccatagcgcgcgcgatccacgttctgccgctcggcaaacgcctggatgctcagcggcgccacggcgccgcccagcttgttgacgttttcctgcagctgcgcgccggcgagcgtgcggttgatctcgcggttcatgcgctcgacgatggccggcggcgtgccggcgggcgcatagacgccgaaggtcgagtcgccgtccacgtcctgcaggccggcctcggccagcgtcggcacgtccgggtattgcgccgcgcgcttggcgctggccaccgccagcagcctgagcttgccgctggccacgtgctgcaggccggggccgggatcgaacatgaactgcacctgccctgccagcaggtcgctcagggccggggccgcgcccttgtacggcacgtgcacggcgtccagcttgccggcgcgtttgaacatctcggcagcgatatgcggcgtgctgccgttgccggccgagccgtagctaagcctgcccggatgctcgcgcacataggcgatgaacgcttccagcgtcttcgccggcaccgacggatgcaccagcaggtagacccgcaccagcgccaccgacgcgaccggggtcagatccttgatcggatcgtacggcatcttcttgtagaggaagggatcgatcgccaccgcgccgcccgaggtcagcaggaaggtatagccatcggccggcgccttggccacggcatcgccgccgacgatgccgttggcgccggggcggttgtcgatcaccaccggacgcttcagcgcctcggacagaccgggcgagatgccgcgcgccagcgtatccgcggccccgccggccgggaagttgacgaccagccggatcggcttgtccggccacggctgcgcggcggccggcgcgctcacgccagccagcaggcccggcgcgcacagtgcggcgcaaagggcgcgcgcgatacggtgggggaatcgcatgatggttgtctcctgccttaggttttgctgcagcctgccgcagcgctctgcggcgccactcagaacggatattgccgtggcgtggtctgcaccgtgatccagcgcagctcggtgaaggcatcgatcccggccttgccgccgaagcggccataaccactcgccttcacgccgccgaacggcatctgcgcctcgtcgtgcacggtcgggccgttgacgtggcagatgcccgattcgatgcggccggcgacccgcatcgcgcgcgccacatcgccgccgaacacggccgccgacagcccataggccgaatcattggcgcaggcaatggccgcttccacgccatccacgcgcaccacggccttgaccggcccgaacgattcctcgcgatagatctccatgtccggcgtcacgtaatccagcaccgtggcccgcatcagcgtgtcggccgccttgccgccgcagaccagccgcgcgcccttggccagcgcgtcgtcgatcatggcgttgcagcgctcgacggtgctcatgtcgaccaccgagcccagcaccgccgggccggtgcgcggatccgccagcggcaaggcgccggcgcgcgcggcaaagcgtgccacgaaggcgtccgcgatgctggcatccaccacgatgcgctcggtggacatgcagatctggcctgagttggcgaaggcgccgaagatggcaccgtccaccgcggcgtccaggtcggcatcgtccagcaccaccagcggcgccttgccgcccagttccagcaccgcgggcttcaggtggcgcgcgcaggcctgcgcgatcagccgccccacgcgcgtggagccggtgaagttgatgcggcgcactgccgggtgggcgatgatggtctcgaccacggcggcggcatcggccggggcgttggtgacaaagttgaccactcccgccgggaagcccgcctccgccagcgcatcgacgatcaggccatgcgtggccggacagatctccgaacccttcaggatgaccgtattgccgcacgccagcgccgtggccacggcgcgcacgcccaggatcaccggtgcgttccacggcgcgatgcccagcaccacgcccgcgccctgccgcaccgccatggccaggctgcccggcacgtcggagggaatcacctcgccgttgatctgcgtggtcagcgcagcggcctcctgcagcatgccgacggcaagttgcacattgaagccggcccacatcgccgacgcaccggtctctgccgccatcgcggcggtgagcgccccggccttgccttcaagtgcctgcgccgcgcgcatgagcaaggcgcgccgttcgcccggcccggtgtcgcgccaggccgggaaggcgcgcgcggcagcgtcggcagcggccagcgcatcggcggcggtggctgccggcgcccgcgtggccacgctgtggtcaagcgggttgcggcgctcgaaggtggcaccgttggcggcctgcgtgcgctcgccgttgatcagcatggtgatgctttgcatcctggagtctcctggaaggggtacttcgtctgtcgtctgtcgtctggcgccgcggctcaggctacctcgatctccaccacggtcggcacacgcatccgcagggctgtcgccagcgcttcgcgcaatgcggcaggatgagccactcgcgccgcctcgcaaccatgcccgagcgcaatcgacacgaaatccagatcgggcaaggccgtgccgaccagcggatcttcgctgccaaagccgaaggtcggcgcaaactcctgcagggcggcgtagcgccggttgttgagcacaatgaacgtgatcggcaggcccagttgcgcggcgctccacagcgcctggatcgaatacatgctggagccgtcgccgaccaggccgatcaccttgcgccccggcttgcccagcgcgacgcccactgccgcgggcaggccgtagccaagcccgccgctgcacatcgtatagaaggtctcgctgcgcaggatgggcaggtggcgatgcatcaccgggcgcgcgctgggcgcttcctcgaccacgatggaatcagggtcgcgcagctccgccagcgtctgcaggacataggcgacgctcatcggcatgccgggctcggcgcgcggtgccggcacgcgcgggcgcggggcttcgcgccgcggcggcgccgggcgcgccagcaggtcggccacgccctgacggatgctgccgactgcggcagtgcccaccggcgcccatgcggcgatattcggatcgtcgatcagctgcaccacctgcgccccgggcggcgcatgggggccacccccctcgacgtgataggtgaaggctgccgcccccagcgcgaacacaaggtcgtggcccgtgagcagcccgacgatcttctcgcgcatcgccggcaggaagccggcaaacagcggatggtcttccggaaagccgcagcgccccgacatcggcgccacccacaccgccgcctggtgccgttccgccagccgcaccacatcgtcccaggcgccatcgcggtccacggccgcgcccaccacgaacgccggccggcggctggcatcgagagcgtcgccgatctgcgccagcagtgccggctgcacgcggctttcagtgctgaccgtgcgcggcagcaccggctcgcacggccgggcccagtcatcggcgggaatcgagatcagcaccggcccgcgcggcggctgcatggcgatgtagtagccgcgcgcaatcgccagcggcacatcttcggcccgcgccggctcgcaactccacttcacgtagggcttgggcagctcggtggcctgggccgagaacaggaagggttcgaacggcaggatcgagcgcgcctgctgcccggcagtgatcaccatcggggtgcggttcttgtgggcggtgaagatgctgcccatggcatggccgacaccggccgccgagtgcaggttgacgaaggccgcattgcgggtggcctgggcatagccatcggccatgcccaccaccacggactcctgcaggccgaggatgtagcggaagtcgtcgggaaaatcgaggaacagcggcagctcggtcgagccgggattgccgaagatggtggtcatgccgaacgcgcgcagcaggtccagcacagcggtgcgcacggtcgtgggagtggcggcggcaggcgtggcggaaatggccatggtcgtggaggctccagtgcggaatcagtgacaaagcttgcggaccagtatggacaatcaggccttgcccagaaattgccgttttggggcaaagtcattacgattcggcatgaccctcgatctgcgccagctccttgccttccttgcggtgtgcgaacacggcagcctgggccgcgccgccgcacagctgaacctcacccagccggcactgagccgcaccatccagcggctggaagcccagctggacgcgccactgttcgaacgctatgccaccggcatggtgctgacggcctacggcgaggccctgctgccgcacgccaacctcttgcgccacgaggccgagcacgccaccgaggccgtgcgcgcgctgcgcgggctggccgccggcaccatccgcgtgggcaccgtcgccagcgtcgccagcgtggtgctgccggaggcgatcgaggcggtgctggcacgctggcctgggctgcgcgtgcgcattgtcgaaggggtgggagatttcctggccgatgcgctgctgcgccgcgagatcgacctggccatcggcatcgccctgccggagaacgaggaaatctgcgccgtggcggatgttggctggagcgacagcagcttcgtggtcgccgccgccggacatccgctgacgggcaggacggcgctgcggctggcggataccgccgcttgccgctgggtcatgccgccgcgcggcacggcgcccttcgacgaactgcagcggctgtttgcgcgcgccgggctgccgccgccggacatcgtcgccgaaacccgctcgatcattgcgctcaaggcgctggtggcacgcgcgggcttcctcagctggatggctgcgccgatgtacgaggccgagcaaaaggccggcatgatcctgccgctgcccattgaaggcgcccaggcgccgcgccggctggcggtgtaccggcgccgccagggcatcctgccggcgccggcggcgaagctgctggagcagttgcgccggttgacatcggacgtgggctgaacgtcaggtgggccgcgccaggtcggccccttccatcacccatgcgcggaacgtgcgcagcgccggcaggtgctgcttctgctccggatagcacaggtaatagcccttcttggccagcacctgggccggatgcgccaccaccagcgccccggtggccagctcttcctcgatcaggcagcgcgggatcagcgcgatgcccagacccgaaagcgcggcctgcgtgagcagcgagaactggtcgaagcgcgcgccgctccaggcctcgcgggttggcacccccagcgtggcgaaccagtcgggccaggcttcgggcacggtggtgtggtgcagcagcggatagcgcagcaaggcagcgggcgtgggcgcaacgccgccgggctcggacgccagcaggcccggacggcacaccggcagcacctcgcgcccggtcatgtagtcggccaggctgccgggccagacgccgtcgccgaagcggatcgcggcgtccaggtccggctcggaaaaatcgtagccctgcgcgtgcggcacgaattcgagcttcacttccggatggcgcgcgaaaaactgcggcaggcgcgggatcagccacttggcgcccagcgtcggcatgctggcgatatgcagcacgccgccccgcccctgccgcgccatcagctcgacggtggcggcctccagctcgttcaggctggggccgatgcgctccaggtagcgctcgcccgcggtggtcagcatcaggcgctggcgcacgcgctggaacagctccacgcccaggtaagcctccaggctgcgcacctgcttgctgaccgcgccttgcgtgacatgcagttcacgcgcggctacggtaaaactgttatggcgtgccgcggcctcaaaggcctgcaactcggtcagcgacggacataagcgtcgcataaatcacctctaattcacgaccaaatggaatgagctaaggattttatttcgtttgcggcacgcttgctcgggcgcgcagaatcgtgaaatccactttattcctcccctcgccctggatccccccatgcaacgtcgccatcttctccgcctcctggccaccgcttcggccgccgccgctgccggcatctccttcagcgccatggcccaggccggctatccgaccaagccgatcacgctggtggtgcccttccccgccggcggcaccacggacatcgtcgcgcgcatcgtcgccgacaagctcggccagcaactgggccaggccgtggtggttgacaaccgcggcggcgccggtggcagcatcggcaccgctttcctgtccaaggcggcgccggacggctacacgctgggcattgccacggcctcgacccatggcatcaatccggcggtctacccgcgcctgtcctacgatgcaaccaaggacttcacaaccatcaccaacctggcctcggtgcccaacgtgatgagcatcaacccggcggtcaaggccaccgacatgaagtccttcatcgcgctggcgcagtcgcagcccaacaagctggcctatggctcggcgggcaacggcagcgtctcgcacatgatgggggaactgttcaagatgagcagcaagaccgaactgctgcacgtgccctacaagggcgtgggcccggcgctgaacgacgcgctggccggccaggtgcaggtgctgttcgacaacctgccgtcgtcgctgccattcattgaaggcggcaagctgcgtgcgctcgccgtggcagcgcccaagcgcgtggccgcgctgcccaacgtgccgaccttcgccgagctgggcctgggcgaggtcaacgacgccgcctggttcggcctgatcgcgccggccaacctgccggcggatatccagaccaggctccacaccgccgcggtcaaggtgctggcactgccggaagtgaaggccaagctcgagaagctgggcgcgaccccggtaggcgatacgccggcgcactttgccgcccagatcaagagcgaagtggccaagaacaagcgcgtggccgccgccgccaggatctcgctcgactgactttacggcaacaccatgaccgacaccgaccgaaccaccgcggacagtccgttctacctgtaccagcccgagggcgagcccgcggcgctgttcctggactcgccgcacagcgcgacgacctacccgacggacttccgccccgaccccgccctgccgctgccgctgctgcgccaggccgaagacacctttgtcgacgagctctacgccggcgccccggcgcgcggcatcgcgctgctgtgcgcgggcttcccgcgcagctacctggacgccaaccgcgcgctggaagaaatcgacgaagccctgctcgacgcaccctggcccggcgcccggcaggagaccgccaagacccggctgggcaagggcctggtctggcgcgtgctggacaccggcgaggccatctacgaccgcaagctgagcgtggaagaagtgcaggcgcgcatcaaccgctgctacctgccctattacgcgcagctgcagaagctggccgaccgcgccgtggccagccacggcagcgcctggcatatcaactgccattcgatgccgagccacgccgcgccattcgccaccgagttcccggggctggagcatccggatttcgtggtcggcgaccgcgacggcaccacctgcgacaagcgcttcaccgaccgggtcgagggcgtgctcaaggagatgggctacgacgtctggcgcaatcacccgtacaagggcgtggagatcgtgcgcgtggtgggccagccccaggccggctgccacagcctgcagctggaggtcaaccgcaagctctacatggacgaggtgggcctgacgcataccgcgggctttgccaggctgcgccatgacctgaacctgctgctcgacgaactgctgcgctttacgcgctcgatgccgtcgcgcgtggcctgacccgggccggggctgcgccacgcagccccgcataagctgcgggttcaccgcagttgtgcgaaacaggggattcctgctagagcacaagtcacttgttgcacgacatcatgcgttagaagaatgggtaacaagatttaggaactttgtcagataggtttcctctatcatggcattcctttgcgaacccatcttgcctgccggccctacggcgccgcgggcaaaccgaagaacgcacacaccgctcacaccgtgatccgacgaatctccgaactgctcggcagccagctccgcatggtggctgccgcagtggccggtgcgatcgcgctggcaggctgcgccaatatgccggccgaagatgccagcgccggccctgcacctgccccggcacccgccgccgcgcccgcccgacctgccgccgccgccccggcacccgccactcccacgccacccaccaagaccgtcaccctgcccgaccgcggccgcgtcagcctgtccgagtaccggacccgcatgcgcgaacaactgatgaagaccgagaacgccaccagcgacgtggcggactgcgccgcccacgccagctgggtggtgccgcgctcggccagctacgatgcattgaagatccccaccggcgcgctcgccgcgggacaggccacgaccgagccatggagcggacgcttctcgcccggcaagcaggccgtaccggtcagctcggtggtcaccttcgccgccaccgcgcacaagcgccgcggcagcgacgactggcagccggtgaaggtgcgctgcggttatgacgacgggatgatgctggcgtatgagctgctggacagcggcggcgccaccatcagcgaaccggctgccgcgccggccgtgcctgctgctacgcaagcttcggcaagcaagagccgcaagggggccaagggcaagagcacggtatcgaagtcaagcaaggcgacggcgtccaggtcgtcgaagtcaacgagcgccaagtccacctccggctcggccaagacgaccagcaaggccaggaagaagcaataggcgcaaagcgggcgcaccgcgtccgcgccaacgccgttccggcccacccggtttcgtccggttgggccgtttgcgttggctcagcccaggtagtccaggatcgcctgcagcatcgccatccccagcagcgcactgcgcgccccgttccagccgaccgccggatccggcaggtcggcattgtccttgaacggcatctccagcgtcagcgccaggcagccgaaggtatgcccgatgtacttggacgccagcttgagcgcatccgcgttgtacttgctggccgcgtagccgtgcacatcctggaaatccggcgagacccgcttgaaggcctcgataaagcgctgctgctcgcgccggcgcgcctcggtaaagcccggcagcatctcgctgccggcgacgaagttgtacggcagtccctcgtcgccatggatgtcgaagaacatgtcgcagccgctggcctcgatggcgcggcgcacgtggtagacctcggggctggtatccgggctcggcgccatccactcgcggttcaggttggcgccggcggcgttggtgcgcaggttgccgcgcgccgagccgtccgggttcatgttcggcacgatatggaacaccgcgcgctccagcagcttgcgcgcgaccgggtcgcccgcccacatgccggtgccggtcaggcgctgcagcacgccttcgacaaaccattcggccatgctctcgcccgggtgctggcgcgcgatcatccagatggtcttcttgccggggccgggctggcccagcgtgacgcgggtcatgtcgcgcccgtccacggtgctgcccaggtgcgacagccgcgccagcggcgagcgctggcagctggcgagcagcgacaggtggcgctcatccggatacggctcgaaatacgcaaaccagatgctgtcgtgctcgggcgtgaattccaccgtcatcacctggccgtcaaagcgcgtcggcacgcggaaccagttggcgcggtcgtacgaagccaccgcgcggtagtcgcgccatccgtccgggtaggtgcagtcgccggcgttcaggaagtgcatccggcacgcctgccccgccgcgccctgcaggcggaaatggaaccattggcggaagtcggcgtgcgaatcggcgcggatgcgcaggcggatatcgtcggcgcggtcgagcgcctcgacctcgatggcgccggagtcgaattgcgaagagatgtgcaaggcggcaggcatggctggcagtctcgtggcgatgggtttcagtcttccaggcggcggcggaacacccagcgggtggtatccgaggccgcggcgtcgaaggcgtagccgtcttcggcaaagcgcttgagcttttccggctcggtcacgcgctgcgtcacggcgtagcgcgccatggtgccgcgcgcgcgcttggcgtggaacgaaatgatcttgtagcggccgcccttccagtcctcgaacaccggcgtgacgatcctggcctgcagcaccttgggccgcaccaccttgaaatattcttccgaggccaggttgaccagcaccggcgcgccttcctgcctaagcgcggccatgtcggcgttgatcatctgcgtgacatcgtcgccccagaacgcgtacaggtccttgccggcaacgttgtcgaggcgcgtgcccatctccagccggtagggctgcatccagtccagcgggcgcagcacgccgtacaggccggacaggatgcgcaggtgcttctgcgcaaagccgaggtcgtcggccgacagcgttttcgcgtcgaggccgtcgtagacgtcgccattgaaggccagcaccgcctgcttgctgttggccgcggtgaactccggcgaccagtcgccgtagcgcgtcacattgagcaccgcgagcttgtcggagatgtccatcagcgcgcccacatcctgcggcgccagcttgcgcaggcgctcgatcagcgtggcggaacggtcgataaagcgcggcagcgtatgggtcttgaggcgcgggggagtctcgtagtccagcgacttggcgggagacaaaacgatgagcatggcaaaatcgcggcagtagccaaggacaaacaagccaagattgtagcgaatgcgcctcgacaccaccgcaaccaccctcttcgccagccccgccggcgtcacatcagcgccgcgcgtggtgctggactccaacatctgggtggacctgctggtcttccgcgacccgcatgtggagccgatccgcaccgcgcttgaggccggcaccatcgccccggtgatccgcgccgactgccgcgaggaactgcggcgggtgctggcctatccgcaatttgcccgctttgacatcgatatcgatgccgcgctggccaccgtcgaccgcctcgccagcctggaagccgcgccgccgcaggccgactacgacgccatccgcctgccccgctgcaaggacaccgacgaccagaagttcgttgagctggcgcactttgccggcgccgcctgcctggtatcgaaggacaaggccgtgctcaagctgcgcacccgcctgcgccgcagcagcggcgtggaagtgatgacgccgccggccttcggcgcctggctggccacgcttggcgccgccagcgccgccgatccgctttagaatgtcggctcccggcgccgcctacgtggtggcgccgcacgcctgatcgcatcccgtccccaccgcatcgacacgttcgcatcatgtccgcagacaccacccacacccagttgacgccgctgaccccgccgccctcgcgcctgcccgcagtcggcaccaccatcttcaccgtgatgtccgcgctggccaccgagaagaacgccgtcaacctgggccagggcttcccggacttcgactgcgaccccaggatcgtcgatgccgtgaccgccgccatgcgcgccggccataaccagtacccgccgatggcgggcgtgccgcgcctgcgccaggccatcgccgccaagatcgccagcctctatggccaccagtacagctgggacaccgagatcaccgtcaccgccggggccacccagggcatcctgaccgcgatcctgtgcgcggtgcatccgggcgacgaggtgatcgtgctggagccgtgctacgacagctacctgcccgcgatcgagctggccggcgccaccgccgtgccggtcacgctggaagcgccggaattccgcgtgcccttcgacaagctggccgccgcgatcacgccgcgcacgcgcatgatcctgatcaacacgccgcacaaccccaccggcacgatcctgcgcgcggccgacatggaccagctggcgcagatcctggccggcaccgacatcctgctgctctcggacgaagtctacgagcacatggtctacgacggccagcagcacgcctcggtctcgcgccatcctgagcttgcgcgccgcagcttcgtgatctccagcttcggcaagacctatcacgtgaccggctggaaagtcggctacgtggccgcgccggccgcgctgatggccgagttccgcaaggtgcaccagttcaacgtgttcaccgtgaacacgccggtgcagcatggcctggccgactacatggccgatcccgcgccctacctgcagctgtcggcgttctaccaggccaagcgcgacttcttccgcgccgggctggccaacagccgcttcaagctgctgccgtcggacggcacctacttccagtgcgtcgactactcggccatttccgacctgagcgaggccgacttcgccatgtggctgacgcgcgagatcggcgtggccgcgatcccggtctcggccttctacacgcagccgcgtgaatcgggcgtggtgcgtttctgctttgccaagaaggaagagacgctggcgctggcgctggagcggctggccaggctgtgatgaaaacaaaaacgcccgcgatgaattcgcgggcgtttttcacacatgcggcagttcacgccgcttcgcttactacttgctgcggctcgccatcagctcaagattggccttgcggtcggcattgaccttctgcaccgattcacgcgccgacagcgtcttcaggtagtccttgaccggcaggtcggccagcaggtcggtgccgtagatgatcttggtgcacgacgacaccagcggcaggtgcgccgcggcggcgcagtcggccagcgtgaaggtgtcgccggcgatatacggcgagaacttcgccagcttggcgaaggcggggacatagcgcgtcagcagcttgtgctggcggtccttgacgccatcgctgaccttgccgccgaagaatgcctcggggtacagctcgcgcgcggtcagctccaggtacagttccatgaagacgacgatctcgcgcaccttggcggcctggtacgggtcgagcggcagcagcggcgtctgcggataggccgcctcgacgtagtcgacgatggcttcggactcgcacagcgggccggattcggtgatgatgtagggcaccttgcccgcgggcgtggccgccaggtcggtctggccgatccaggccagcacctcttcgaacggcacgttcttttccagcagcgccagcttcactttgttgtagtagttgctggcggcaaaaccgcagagcttcagcatgtcgtctctctccgttattggaatgatccccgcatcgcacggtgcggatgtcgggtgattgtggaccatccggggtctgcagtgtaccggctggccgatcagcgcacgccgcctgccccgccggactgttgcggaaggtgcaaaaaacgtacgatcgtgctaatttaaccacaacttttggggcaactgatgagcactttcaccatcgatacgctgggtatcgtcggcaccggcgccatgggccggggcatcgcgcagatcgccgcgcaggcgggcctgaccgtcaacctgtacgacgccaacccgcaagccgtggccgccgcgcgccagtacctgcaggacacgctggccaagctcgccgacaagggcaagatcagcgccgccgacgcagaggccacgctggcccgcgtcaagccctgcggcacgctggaagacctggccggctgcgacatggtgctggaagccatcgtcgagaagctggaggtcaagcgcgacctgatcgccaagctcgaagcggtcctgcgtgaagacgccgtcattgcctccaacacgtcgtcgctgtcgatcaccgcgatcgccgtgggttcaaggcacccgggccgcatcgccggctaccacttcttcaacccggtgccgctgatgaaggtggtcgaggtcatcgacggcctgtcgggcaaccccgcggtgggcgacgcgctgatggcgctgtcgcgccgcatgggccatacgccggtgcgctgcaaggacatgccaggctttatcgtcaaccatgccggccgcggcatgaatatcgaaggcctgaaggtcgcgcaggaaggcgtggccggatttgccgacatcgacaacatcatgcgcgagcaggccggcttccgcatgggcccgttcgagctgatggacctgaccgggctggacgtgtcgcacccggtgatggaatcgatctacaaccagttctaccaggaaccgcgctaccgcccctcgccgatcaccgcgatccgcgcggtcggcgggctgatcggccgcaaggcgggtgctggtttctattcgtatgccgatggccagaagcaggtgccggcagccgccgcggtgccgggcgcacgtccgtcgagcgtgtgggtcagccacgccagcgagcgcggccacgccatggtgaccaagctgctgggcgcgctgggcgtgaccccggaaggcggcaacaagccgtcggccgacgcgctgatcatcgtcaccccgctgggcctggacgccaccaccagcgcgctgcaacagggcctggacccggcccgcacggttgccatcgacacgctgctgccgttcgaggccaccaagcgccgcacgctgatgaccacgccggccaccagcgccgccgcccgcgatgccgcgcacggcctgttcgccagcgacggcgtgccggtcacggtgatccgtgattcggccggcttcgtcgcgcagcgcgtgctctgctgcatcatcaatatcgccagcgatatcgcgcagcagcgcatcgccacgccgtcggacatcgacctcgccgtcaacctgggcctgggttatcccaagggcccgctggcgctgggcgatgcggtcggcccgcaactggtgctggagacgctgcgcaacatggaagcgctgaccggcgacatgcgctaccgcccgagcccgtggctgtggcgccgtgccggcctgggcctgtcgctgctggccgaagagcagtaagcccgccaccgccccaccgaccgagccacgcccatgcccgcacagttgctttcccaccgcgtcgattcgaccctggtgctgaccatctcgaaccccgaggcacgcaatgcgctgcacccggacatctacgcggcctcgcagcaggcgctggatcaggccgccgccgatgactcggtgcgcgcggtcatcatcaccggcgccgacggcattttctgcgccggcggcaacctgaaccggctgctcggcaaccgcagccagccgcaggaggtgcaggccgccagcatcgccctgctgaacggctgggtcgagtcgctgcacgcctttcccaagccgatcatcgcggcagtggaaggcgcggccgcgggcgcgggcttttcggtggtgctggcgtgcgatttcgtggtggcggccagcaatgccaagttcgtgatggcctatgtctccgtggggctcacgcccgacggcggcggctcgtatgagatcgcacgcgcgctgccgcgcccgctggccagcgagctgatgatggaaggcaaaccggtggacgcggcgcggctggcgcagttcgggctggtcaaccgcgtcaccgagccgggccaggccctggacgaggccctgcgcctggccgctggccttgcccgccagtcgccgcacgccgtgggccgcatcaaggccctgatcaaccacgcagccaccgcatcgcgcgccgaacacctgctggccgagcgcgacagcttcgtcgccgcgctgcaccaccccgacggcggcgaaggcatcagcgccttcctggaaaagcgcaagccgcagtacctctgaagccgggcgccggacgcctggctttacccgaacggccagcccgcgacagacgggcatgccgcacaatgcaaggagacaacgcatggaactgccgccgccctcgcgtcgccgcatctacctgatgcggcatggtgccgtttcatatttcgacgaggccgggcgccctgccctgcccgagatggtgccgctgaacgagaccggtcgcatgcaggcgaccgccgccggccgcgcctttgccgccgaacagatccgcttcgaccgcgtcatcgtcagcggactgccgcgcacggtggagaccgcggagcgcgtgctggccgagctgccggagatggacggcatcgtgcctgaagtctggcccgcgctgcaggagatccgcggcggcgacctgtccgcgattgccgaccaggacctgcgcgacgccttcgtcggcgccttcgaaggcgaagtcccggaagacaagcgcttcctcaacggcgagaccatcggccagttcctcgaccgcgtgctgcccgcgctggagcgcctgcgcgccgatcccgactgggacaccgcgctgatggtgctgcacggcggcaccaaccgcgccatcctgtcgcaggccatcacctgcgggcggcgcgtgttcttcggctcgctgctgcagaccgcgggctgcatcaatgtgctcgacatgggcgacggcccgctcgactgggtggtgcgcatgaccaactactcgccgcccacgcccgtgcacagcggcacgcgccacaccaccatggaagtgctgctgcaccagtatttgcgcggacgccagccgcagggctgagcgcgccgcggacttgatcgaatcccaaccgataccgaacagaaaaccaacggagacagcatgaccagcaacgtatcgcacttcgagggcacgcgcccggtagcggaccagcagcgcttcgacaccgacgcgctggaagcctggatgcgccagcacgtggagggctttgccggcccgctgaccgtggagcagttcaagggcggccagtccaacccgaccttcaagctggtcacgccgggccagacctacgtgatgcgcgccaagcccggccccaagagcaagctgctgccttcggcgcacgcgatcgagcgcgaataccgcgtgatggccgcgctggccggcagcgacgtgccggtggcgcgcatgtacgcgctgtgcgaggacgagtccgtgatcggccgcgccttctacatcatggagttcgtcgccggccgcgtgctgtgggaccagtcgctgccgggcatgagcaccgccgagcgcagcgccatctacgacgagatgaaccgcgtcatcgccgcgctgcacacggtcgactacaacgccatcggcctgggcgactacggcaagcccggcaactacttccagcgccagatcgagcgctggaccaagcagtacaagctgtccgagaccgaatcgatcccgtcgatggacgcgctgatggactggctgccgcagcatatcccgcaggaagacgccgacctgacctcgatcgtgcatggcgactaccggctcgacaacctgatgttccacccgaccgagccgcgcgtgctggcggtgctggactgggaactgtccacgctgggccacccgatggccgacttcagctatcactgcatgagctggcatatcgccccgggccagttccgcggcattgccggcgttgacttcgccgcgctgggcatccccgacgaagccagctaccgccgcctgtacgagcagcgcaccggccgcccgatcacgggcgactggaacttctatctggccttcagcatgttccgcatcgccggcatcctgcaggggatcatgaagcgcgtggtggacggcaccgcgtcgtcggcgcaggcgctggacgcaggcaagcgcgcgcggccgatggcggagatggggtggcagtacgcacagaaggcgaagggctgacgcggcaactgctgcagcaaaagaagacgggcgccgaggcgcccgtttttcatctgcatcgcgcggcgctcaatcccccagcgccaccccttcccgccgcgggtccgcaccaccggcccacaccaccttgccgtcaggcccctgcttgcgcatgatcgcctgcgtgccgctggtcatctcgatctcggccacctggtggccgcgctgctgcagtgcctgcaccaggcccggcgagaccagccccttctccacctcggtcgggccgttgcggctgccgaagttgcccatgccgatggcggcctgcacgtccatgttccagtccagcatgccgaccagggtcttggacacatactcgatgatctgcgagccgcccggcgaaccgaccgtggcgaccagctggccgctctcgcggtcgaacaccagcgtcggcgccatcgacgagcgcgggcgcttgcccggctgcacgcggttggccaccggcttgccgttctcgctcggcacgaaggagaaatcggtcagctggttgttcagcatgaagccgcgcaccatcaaatgggagccgaagtacgactcgatcgtggtggtcattgaaatcgccccgccgcggccatcgaccgcaacgatctgcgaggtggagacgcgcggcggtgaacggtcgggcgcgtaggccatcgccgtgcccggcggcacccccggctgggccttgctcatgctcttgtcgccgatcagctccgcgcgcgtggcaaggtaggacgggctgaccaggccggtcacgttgaccggcacgaagtcggcatcggccacgtacaggccacggtcggcgtaggccaggcggtcggcttcggagattgcgtggaccgcgtcgggattggcctccatcaccgccggcgtgttcacgccctgcggcttgagcgcggccagcgcgtacttgggattcttggtctcgagcgcctgcagcgtgcccaggatctgcgcgatggcgatgccgcccgacgacggcggcggcatgccgcagatcttccagcgcttgtagtcggtacagaccggcacgcgctgcttggcccggtagctgcccaggtcagccagcgacagcgagccggcattgctgccgccgttgaccttggcgacgatatcgcgcgcgatcggcccgttgtagagcacgccggcaccgcgccgggcgacatcgcgcagggtctgcgccagcttcgggttcttcagcaccgtgccggccggcttgggcttgccctgtgcatccaggaagtacgcggccatctccggcgaattggccaggaacttgtcggcagccacctgcgtgtacagccgctgcgagatcgggaaacccttctcggccaggtcgatggcgggctggaacagcttggcccacggcaggcggccgtgcttctggtgtgccatttccagcgcgcgcatcacgccgggcgtgccgacggagcgtcccccgatctgggcctcgctgaactccatgggcttgccgtcggggcgcaggaacaggttttcggtggcgccggcaggggcggtctcgcggccgtcgaaggcctgaacgttcttgccgtcccagtacatgatgaaggcaccgccgccgatgccggtggcctgcggctcgaccagcgtcagcacggcctgcatcgcgatggcggcgtcgatggccgagccgccctggcgcaggatggcgcgcccggcctcgctcgccaacgggttggccgcggcagccatgtggcgctgcgcgtagacggtggacatgcccgggcgatacccggaggcaacttccggggccggcggcatcgcggcaggcggtgtcgtggccgacggcgcggccggtgctgcgggcgcggcggtccctccgccctgggtaccacaagcaccgagcagcgcagtcagggcaagggccagcgcgccgcgccacgccatcgaagagaggtcagggtgagccatgcgatatctcctggggaaggatcaaacgattgtagtggcgatcggagcatcctggggcaagaaagtctgactgccgccacatgagggagccacatgcaggtgcaaaaaagattctcccggcttaaccccaacccctcgccagcaccgtttcatcgacaggccgtcatgaccggggacccgccccgtggccgctcaggagaacaatatgcaacttcgcgcaccggccatcatttccagttttgccgccgctctggtgttgtcggcctgcggcgggcattcgccgtcgcttcccccggaagtggcccagcctgtgccgccgcccgcggccccggcgcccacgcacgaccacgccgccaaggctggccaggtggcacccgccatggaaatgcacgccatcgccccgcgcgccccgctggcgatgccctaccaccttccaccgccggtaccagccgagcgcgaacgctacggcgccatcgaggaaaacggcgtcaggctggtggcgcaggcgccggtatccaccttcagcatcgatgtcgataccggcagctacagcaatatgcgccgcatgctcaatgccggacgcatgccgccggccgatgcggtgcgcgtggaagagttgctgaactacttcccctatgactatgcccagcccgccgacggccgtccgttcgccgtgcatgccgcgctggcgcccgcgccctggcacccggccaatgtgctgctgcgcatcggcatcaagggcaaggacatggccagcgccgcgctgccgcccgccaacctggtattcctggtggatgtgtcgggatcgatgaattcgccggacaagctgctgctgctgaagtcctcgctcaagctgctggtgaacaagctgcggccgcaggaccgcatcacgctggtcacctatgccagcggcacgcgcgtggcgctgccacccacgccgggcagcgacaagaccgccatcagcgccgccatcgaccagctcgtggccgggggcagcaccgccggcgccagcggcatcgcgctggcctatcaggccgcgcagcagagctttatcgccggcggcatcaaccgcgtgctgctggccaccgacggcgacttcaatgtgggcgtgaccgacttccggcaactcaagagcatggtggaagagaaacgcaagtcgggcgtatcgctgtccacgctcggtttcggcaccggcaactacaacgagcagctgatggagcagctggccgatgccggcgacggcgcctattcgtatatcgacaacctgatggaaggcaacaaggtgctggtcagcgagatcagctcgaccctggccaccatcgcgcgcgacgtgaagatccaggtggaattcaatccggccacggtgaaggagtatcgcctgatcggctatgagaaccgcatgctggcgcgcgaggacttcaacaacgacaaggtcgatgccggcgatatcggcgcgggccacaccgtgacggcgctgtatgagctgacgctggccggccaggccgggctggtcgatccgctgcgctaccagccggccgcacccgcgccggggcgcgacggcgagctcgcgcacatcaagctgcgctacaagctgcctgccgccagcaccagccagttgatggacatcaccgtcgtgcggcaggccatccgtccgctggcgcaaggcgatgacgacttccgctttgccgcggcggtggccggtttcggtcaggtgctgcgcggcggcaagttcaccggcgactggcgctacgccgatgcccacgcgctggcccagggcgcccgcggcaccgaccgctttggctatcggggcgagttcctcaagctggtggacctggcacagagcctggccacggccagtccggccggcgctaccagcggcgggccggccgagcgtgcggcacgctgacaccagcccgggccgcgagccggcgcaaggcggcgcggcggactgtcgcgccgccttgcgctctcctatactccggcgcatgcaggcacccgaccccgtcccttccgccgcgcccggcgccgcgttgtccgcgctgcccgaccatgacctgatgctgctggtggcgggcggcatcatcgagcagcccgtcaccgagctgttccgccgccataacgccggcctctacaactacgtggcctggctgtgccagggcaaccgcggcgaagcggaagacatcgcgcagaagacctgggtcaagctgatgacccgctgcggcgactaccagccggacgcggcgttccgcaccttcctgttccagattgcgcgcaattcctggctcgaccaggtgcgcagcgccgatgcgcgccagcgcgaagcgctggacgaccagccagcggagatgccggccgacgacctgtcgccggaagcggagctgcagttgcgccagcacgcgcaccacgtgcagcgcgcgctgctgcagctgcccgtcgcccagcgcgaggtggtggtgctgcgcttcttcagcgacatgagcgtcgaagagattgcgcagatgctcggcgagaagttcgagacggtgaagagccggctgcgctatgcgtttgcgcgcctgcgcgcaaacctggccggcagcgtgccgggctcgcaggagacgccgtcgtgaacgcggccgaccgctttatcgacggcaaggaccggctttcggcgctgctgcgggagctgcccgcttacgcgccgtccgctgcgctggcagagtcggtgcacgcggccgcacgtgcggcacaacaggaggaggatcgccagcgggccggcgcggcggtcctgcccttcgccgcgccgccaacgctggccatggcggtgcaggaagaagccgcgcgcctgcaggcggcgcaggccgcgcgacgcgatgcgctgcttgcacgcgtggcgtcaggcgagcccgcagcggagatcctgggtgccccggtcggtgccgctgccagcgcgtggctgcaggcacaggcagctgaggcggcaacaccacgggccacagggaccgcaacgcaatccatggcagcgcgcgccgcgcgcgcgcggcggtggtggcgctcgctcgggctagtggccagcgtcgcggcagtggccgggctgaccaccagcatcgtgctgcggcagatcgatgatggcgcactgctgccggcgtcggcgcctgaacaggtgtccgccccggccgctgcgcccgccgcagagatggcggcagcgcccgcaccgcaagctgcggcggagcccgggacggccacgccggcaaatccgccgccagccgcgaaggctgccccggccccgcagcgggaagagcggcctgccccggcgcacgccgggcagcgcagccgcgcgtcggcaacggccgggggcacggcgccacgcgaggccgccacgcaagcaccgccgcaagcgaccgaaagcttgtccgcccaggcgccggccgtggccgccgcaccggccgctcccgcgtatccggccatggcagaagcagtcccgcagccggcaatgccggcacccgcggcaccgccggcggccgcgccgcgggcagattttgcacgcaaggcagggccaccgatggcggccgcgcgcgcccctgcggcgcacaccgcatccagcatggtcgtgtcgatccaggacgaccccgccgccacggccgcgcgcatgccggcggcggcatcggtcacgctgctggcggccgaaccggacagtgaggcaatcagggaatgggcaggacggctctggcagtcgatgccggcggcgcaacgcccgccggtgccatttgccgtgcaggccgaccgcacgctggccccgggccaggtgcgcatcgaactgcggcacggcgcgccgcaatgagcgcgccgctgtgctggcgagtgctggtcagcgtgtggtgaacgaccagctcaggtccaccggctgcgaacccagccggccggtaaccctcacgctgtagcgctgctggctggccagcggcgccaccggcgtgcagatcgccaggccgcgtgccgcgctggagaggcccgacgaacggctgtcgaccttgaggcagctcacattgttgccttgcgcgtcggtgatgacgaagttgtcggcatcgaactgcagcgaggtgttgatggcctgcagcgaaaccggatagcccacggtcttgccctcatagcctggggcggggttggggctttcggtgttgacccagctggccggcacgtcggcctggccgttgtacgggtaggccaccatctggctgtcgctgccgcccttcgatgcatcggccaggtcgatggtctggtagtagctggccgaggtgccgctgccatcagggcccacgcgctcggcaaagccgctgccggccgagccgtagctgcccagcagcgcggcgcggtggaacggcgcgttgaccaggtccgacaccagcgcgtccttgggcgacatcgacagctgcgcattggcaaccgaagtccagcggttggcaccggccacgacttccgcggtggcattggtcggataggcggcctggatgcgctcgttgggcgtggcgccggtatagcccggcttgccgctggtctcgtcgtgcgtcagcgtggcgttggccagcatgtaggcagtgtggttctgcgccacggtattgagcggatcgcgtgccgccagcggcggcaggcccacctgctcgcgccgatagttggcgtagcacaggccggcgctgcgcggctcttccagcacgcggtaattgctgaccgcactgccgcgcgccggcagcagcgagacgccgccgcccgccgcgggtgccggcgccgtgccgctgacggtatagcaggcacctgcggtggatggcgtgatcgagccagagccggacggcgcgctggcctgcccgttcgcttgcgatgcgttcgacgaagtaccgccgccgccatcgccatcgccaccaccgccgccacatgcggacagtgccagcgccgcagcagcgcaaagggtggtcagggcgagcgtggtgcgccgcgcgcgtcgcggcggcatgggttggtgatcagcaagcaagcgtttcccggtcatcgttctgaatcgtcgtggtcatcggaggaaggaacctgccccgggggatccgcaggcgcggacagccggcgcggcaaccaccgccagcaccgtgtggacacgggctcgcggcggcggcgccgggggcagaaagaccggacgatggtatgggcgcggaccggcagggtctagcccatgaacaattccttacgtgtgacccgcgcgcgccgcaccgaggcgccgcggggatcgcttgcggtgcccgccgtgcgggcgcgagggcacttagctggcggcggccacgtcggccatgccggtgccgagcgcggccatcaccgccatcagctgctcgcgcagccagcggttggcaccgtcgttttcgccgcccgcatgccagtacaggtgcagttccagcgacggcaccttgaacggcagcgacagcaggcggttggcatagggctcattggcgatgcgcgcatagcgcagcggcagcgtggccagcaggtcggtgcagctgaccacgcggcacgcggccgcgtagtgctggcaacgcaggcgcacgcgccgcgtcaggcccatgcggtgcagggcctggtcttccagcccggcgccgcggcggcgcgacgacacgtgcacatgctcggccgcgaggtagcgctcgagcgtcagttccttcttcaccagcggatggtcgcgccgcgccagcaccaccatcggatcggccatgaacggcgcgtggtggatggcgggcgagaccggcagcaggatgtccagcgcggcgtccagcgtgccggccagcagctcggattccatctcgcggcggtcgaagcggatcgcggcaatctccacctgcggcgccattgccgtgacgcgcgccatcagcggcggcagcagcgtggattccagcgcgtcgcgcatgccgatggtgaaacgccgcacggtattggtgggatcgaagtgcggcgtatcctgcagcgtgcgcgcgaacgattgcagcgcgctgcgcacctcggcggccagcgagcgcgccagcggcgtgggcgccatgccctgcccgcgccgctcgaacagcgggtcgtcgaacagcgtgcgcagccggcccagcgcatggctgaccgcgggctgcgtcaggttgagctggcgcgcggccgcggtgatgctgccttcgctgtagatggcgtcgaacaccacgaagagattcaggtcgatgcgggagagctgcatgccggagattctgtcacggaatgcagggaattgatactggcaaatccagataattcatttttcttattatcagctttcagatagagtgcatttcatcggcccatgccgcactgatgccgaggcctgccgaggccaacgaggcgccgccgcccaccccggcgcccactgattccgtagcgaggagaccacatggatttcgaatacagcccgaaggtcaaggaaatgcaggccaaactgctggccttcttcgaccagcacatctacccgaacgaaaagcgtttcgccgcggagatcgacgccaaccgccgcgccggcaatgcctgggtgccgaccaaggtgatcgaggagctgaagccgctggcacgcgcggccggcctgtggaacctgttcctgccgcgctcgccgcgcgccccgcagggcctgtcgaacctggaatacgccacgctgtgcgaaatcatgggccgggtgccctggtcggccgaggtcttcaactgcgcggcccccgacaccggcaacatggagacgctggagcgctatgcctccgaggaactgaaggacaagtggctcgagccgctgctggccggcgagatccgctcggccttcctgatgaccgagccggccgtggcctcgtcggacgcgaccaatatcgaatgccgcatcgagcgcgacggcgaccactatgtgatcaacggcaccaagtggtggtcgtcgggcgcgggcgacccccgctgcaaggtctacatcgtgatgggcaagaccaatcccgacgccggccgccatgagcagcagtcgatgatcgtggtgccggccgataccccgggcatcaccatcaagcgcttcctgccggtgttcggctacgacgacgcgccgcacggccatatggagatcgagctgaagaacgtgcgcgtgccggcctcgaacatcctgctgggcgaaggccgcggcttcgagatcgcgcagggccgcctgggcccgggccgcatccaccactgcatgcgcagcatcggcgtggccgagcgcgcgctggaactgatgtgcaagcgcgcgctgtcgcgcgtggccttcggcaagccggtgtccagccagggcgtgacgcaggaacgtatcgccgaagcccgctgcgagatcgagatggcgcgcctgctgacgctcaaggccgcgtacatgatggacaccgtgggcaacaaggtggccaaggccgagatcgccatgatcaaggtgatcgcccccaacgtggcgctgaaggtgatcgactgggccatccaggtccatggcgccgccggcgtctccagcgacttcccgctggccaactggtgggcgcaccagcgcacgctgcgcctggccgacggcccggacgaggtgcaccgcaacgccatcgccaagctggagctggccaagcacatgaacctgaacccggacgacatcaggatgccggtggcacgcgggttctgaccgcctggcaacgccgcggggcttcggccctgccggcagtatggaaaacgcgcagccagtctgcgcgtttttttcttctgtgcttaaatcgcccggttcgccacgtcagtggttgatgtggccatccccaacgatcgcagccaggagatcttttgcgatgatcgacgtctacacctgggccacgcccaacggccacaaagtccacatcatgctggaagaatgcggcctggagtacaaggtccatccgatcaacatcggcgccggcgaccagttcggcgaggacttcctgaagatcagccccaacaacaagatcccggccatcgtcgaccccgacggcccggacggcaagccgatctcgctgttcgaatcgggcgccatcctgctctacctggccggcaagaccggcaagttcctgcccgaggacgtgcgcggcaagtacgaggcgctgcagtggctgatgttccagatgggcggcgtgggcccgatgctgggccaggcgcaccacttccgcatgtacgcgcccgagaagatcgagtacgcggtcaaccgctacaccaacgaggccaggcgcctgtacggcgtgatcgacacgcagttgtcaaagcacgcctgcctggccggcgagcagtacaccatcgccgacatcgccaccttcccgtggctgcgcagctggcagaaccagggcgtggacctggacgactacccgaacctgaagcgctggttcaacgagatcgccgagcgccccgcggtcaagcgcggcgtggaagtgctggccagcgcgcgcaaggcgctgcaggacgacaaggcgcgcgaggtcctgttcggcgccacgcaatacaagcggcactgagcacggcactgccgcggccggggcgctggccccggctgacccgcctggcatcaggtcggcgccagcgcgtggcacgcaatcgcatacccgtccgcgcgccgtccgccgcgcgccgcaacaccaatctcgacgtcatcgcccggcccgaagcagcacagcaggccggtgcccggcaacagcacgtcgagccggcatgactcgtgcgggtccggcgcgtagagcgtgccgggctgcaggaaggccatgtccccaccggcccgcaccagcgcgccatgccagtgcaggccgatggcgccgcggtagcacagcgcccagcgcagcccgcgcgcctgcagccgctgcgcccagtcatcgcccgactggtccagctggatgaactccggccgcatgccctgctccggctgcgggccctcggcccgcaccacctctgccggcaacacgtgcatgcccgccaccccctcggcgccattggccccgaccgcggcaatgccgcccagcgcgcagtgccaccccgcaggcagcgccaccggccgcgatgcatcggccggcccttgcggcacggtgcgcaccaggatggtgtcgaccatcgcctgcacctgcatcggtacgcctggcgccggcgcaaacagctcgccgccgcccatcagcaggcagccgcgcccgggcgaccacagccgcaggcccccgcgcaggcagccccaccattcatggcggtccgcggcaaattcagcctgggtctcgccggcgcagagaaagacgtagtcgcaggtgctgccgaggccggctgcagcggcaagcaagcgtgactggaacccgggaatgaagtccgacggcgcgtggcggtcggcatggagggcgcgcatccgcgcctcgaacagcgtgaagatctgcatggcaatccccctgcagggcgacaggccgcaaggcggctgtccgcgcagtgcggcgcacgcatgacagcgttgcgcgcagcattgcgcagtggcccgtttggctcggccatgcaggccgtccggttgatgccatcgtgtcgcgccattttgcctggcgcacccctcaatttgcgggtcggacaccgatagtgaggaagaggataagttgtcgtggcctcaaggtcaaacccttagcctcagaccactccgaacctttcacgaccccatgacttctcgaaatctcagactattcggattgcatcttgcctggctacgcaagcagcggggctggtcccaggaaaccctgtcgcttgagagcgggctgtcgcgctcatacctgagcggcatcgaaagcggcaagcgcaacctggcgctcgccaacatctgcaggctggccgagacgctcgccgtgccaaccccggagatgctcgacttcagccgccatgacgccagccagctgcaggtggaacaatcgcgcgcgcccttcggcaaccgccagcgcgcggcgatcgaggccaccgtgcgccatatggcggagctgaccgagcccgagctgaacctggtggccgcggtggcgcgggcgctggcgggcaagggcagcttccgcccgtcgctgactcacgccaccaacgccgcatccgatgccaagggcgacagcgcagactagacgcccagcatgccctgccgttcgataaagcggatcacctcgtccaggccctgcccggacttgacgctgcccatcacgaacggccgggcgccgcgcatcttgcgcgcatcgctctccatcacttccagcgatgccccgacgtatggcgccaggtccgtcttgttgatcaccagcaagtcggacttggtaatgcccggcccaccctttctcggaatcttctcaccgccggctacgtcgatgacgtagatcgtcaaatcagaaagttctgggctgaaggtggcagcgaggttgtcgccgccggactcgatgaagaccacgtcagcatccgggaagcgcgccagcatgcggtccaccgcctccaggttgatcgaggcgtcctcgcggatcgcggtgtgcggacatccgcccgtttccacgcccatgatgcgttccgccggcaacgcgccggagaccgtcaggagacgctggtcctccttcgtgtagatgtcgttggtgatggcaaccaggtcgtagcggtcgcgcatcgccttgcacagcatttccagcagcgtggtcttgccggagccaaccgggccgccgacgccgacgcgcagcggagggttcttcttggtacgggcctgggtcatggtgcgatatgggttcaggatcggaacagccgggagtactgcgtttcgtggcgcgcggaaagcaggcccagcatcggggaaaaggtggaaagttgcggcggcgtggcgtcggcgcggcgcgtggcttcatcgactgtgtcgagcaccgcgcagtgcaggcgccgcagcatgtgctgccccgccacctggcccagcggcaccgccttgatcgccgcggcgacctggttctcggcccagttgaagcaataggcagcgaggccgtcgcgcgcctcgacctgcagcgccacgcatgccgcagtgaacgccgtcggcaggcacaccggcgacagcgccgccagcgtctcgcgcagcacgggcgcgccccactccatctgcgcaatcagcctggacagcgaccagcccatctgctcggtctcaagccgcaactcggaagtctcgcgcgtggcgcggaaccagtcgttccatgtccgcacctgcgcggcatcgcccgctttccagcagcgatgcagcagcagccacagcggcgcttcgcattgcgcctgcacatgcagcaggttgtcgcggatccatcgttctgcgcttgccgcatcgtgcacgctgccacaatcgatcgcagcttccaggccttgcgaatagctgaagccgccgattggcagcgatggcgatgcgaggtgcagcagtgagatcaactggtggagttgcgtcatggcgcggactccggttcagcgatggcttgctcccctctcccgcaagcgggagaggggagtatcggcgagttcagttcttcatcggttggcatggtccggcacccaccttgcagggcaaaattcagtgcttatgtccacacttctcgtcatgcacgtgatcgtgcgagtgcgagtgcgagtgcccatgatgctcatgaaacaccgcctgcgccgccgcatagtcctccgcaaacgtcgcatcgtgcccatgcttgtgcccgccgccataggccccagcctccggctcgaacggcagctcggcacgttcggcgcgcacgcccagccgttgcagcatgtccgccagcaccgcgtcatattccagccgcaggtagtcgcgcccgatctccaccggcgtatggcggttgccgaggtgataggccgcgcgcatcagcgcatgcgggtcttccgcacgcacttccagcaccgcctcggcagcggcctgcacttccacgaagctgccgtcttcggccaccaacaggtcgccgccgcgcagcacggtgccgcgcgccaggaacagcgcggcttcgtcgccgttgtcgagcaccgcgcgcaggcggctcttgctgcgttcggcgaagggcaggaccagcttgggcgcgcggcgcaccagcacgggcgcgatgccgtgcggggcgctcaggagtttgtcgatcttcagcatgggcgatgcggggcgcgggccccggccagtcagaacaggaaatagcgctgcgccatgggcagctcggtggcgggctcgcaggtcagcaactggccgtcggcaacgacctggtaggtctccggatcgaccgtgacatgcggttgccagtcattgtgcaccatgtcgcgcttgcttaccgtgcgcgtgccgcgcaccgccgacagcgtcttggccagtccgtagcgctcgccgatgccggccgccagcgccgcctgcgacacaaaggtcagcgacgaacggtgcagcgccccgccggccgaagcaaacatcggccggtagtgcaccggctgcggcgtcgggatcgacgcattgggatcgcccatcgcggccgcggcaatcatgccgcccttcaggatcaggctgggcttgacgccgaagaacgccggacgccacaacaccaggtcggcccacttgccgacttcaaccgagcccacctcatgagcgatgccatgcgtcagcgccgggttgatggtgtacttggcgacatagcgcttgacgcggaagttgtcgtgcccgccgcgcgcatcgttgggatcgcccggcagcttgccgcgctgcagcgccatcttgtgcgcggtctgccaggtgcggatgatgacctcgccgacgcgccccatcgcctgcgagtcgctggagatcatcgagaacgcgcccaggtcgtgcaggatgtcttcggcggcgatggtctcgcggcggatgcggctttcggcaaaggcgatgtcctcggcaatcgacgggtccaggtggtggcacaccatcagcatgtcgaggtgctcgtccagcgtgttgaccgtgtacgggcgcgtcgggttggtcgacgacggcagcacgttggcctcgccgcacaccttgatgatatcgggcgcatggccgccgcccgcgccttcggtgtggtacgtatggatggtgcggcccttgaacgcggcgatggtcgcttcaacgaagccggcttcgttgagcgtgtcggtatggatcgccacctgggtatcggtcgcgtccgccaccgacaggcaggtgtcgatcgccgccggcgtggtgccccagtcctcgtgcagcttcaggccgatggcgcccgcttccacctgctccaggagcggcccctgctggctggcgttgcccttgcccagcaggccgatattcatcgggtaggcatcggctgcctgcagcatgcgctccatgtaccacggccccggcgtcacggtggtggcaaaggtgccggtggccggcccggtgccgccgccgatcatggtggtgacgccgctcatcagcgcctcttcgatctgctgcgggcaaatgaagtggatatggctgtcgatgccgcctgcggtgacgatcatgccctcgcccgcgatcacctcggtgcctggcccgaccacgatggtgacgcccggctggatatccggattgccggccttgccgatcgccgcgatgcgcccgcccttcaggccgatatcggccttgacgatgccccagtggtcaacgatcagcgcattggtgatgacggtgtcgacgcaatcgctggccatgcgctggctctgccccatgccgtcacggatcactttgccgccgccgaacttcacttcctcgccatagatggtgaagtctttctcgatttcgatgatgagcccggtatcggccagccgcaggcggtcgccggtggtcgggccgaacatctcggcataggcctgcctggagatctttgccatcacagcgctcccatgatcttgccgttgaagccatagacgatgcggtcgccgtccagcgccaccagttccaccgtgcgcgtctgaccgggctcgaagcgcaccgcggtgccggcggcaatattcagccggaagccgcgcgcggtttcgcggtcaaaggccagcgccgcattggtctcgtagaaatggaagtgcgagccgacctggatcggccggtcgccggtattggccaccgtcacgctgaccgtggcgcggccggcattcagttcgatctcgccgtcggcgggcatcagttcaccggggatcatggcgattctcctcaggccaccagcaggctggcgccatacagcgccacgccggcacctgccgcgcgggccagccagccggcatggcggcgcagcaacgtgccggcgccgatgcccagcaggtgcagcgccatggtggcggccgcaaacccgcctacgtatgcgagtaccgcaggcagcgcgcccgcagtggcgggcagttcggccccgtgggcgtagccgtggaagatggcaaagccgccgaccagcagcgtaccggcccacgccggcagcttcgcgcgcagcgccagcagcaacccgatcaccagcaacgaggccgcgatcatcggttcgactgcgggcagcgccacaccggacaggccgattgcagcccccaccagcatcagcgccacgaaggccagcggcaggcgcagggtgtcggcggccgagcgggcaatcaatgcgctccacacgcccaccgccgccatcgccagcaaatggtcggcgccggtgaaggggtgcgccaggccggcccacaggctggcgctgacggtggcggcatcgtggccgggatgcgccagggcggcgccggcggcaacggtcagggaagtgcccagggcaaggcgcaggcaggcggtacggttcatgtcggctctcgggttggtcttgttatcgcggtccagaatcggaatcggtcatgttcagacaatgggatggtggacggtcaccagcttggtgccatccggaaaggtggcctccacctggatctcggggatcatctcggccacgccatccatcacgtcctcgcggcccagcacggtggtgccctcatgcatcagctcggccacggtgcggccatcgcgcgcgccttccatgatggcggcggtgatcagcgccaccgcttccgggtagttcagcttcagcccgcgtgccttgcgccgctcggccagcagcgcggcggtgaagatcagcagcttgtctttctctcgcggcgtcagttccatctcttgttcctggtttcttgtgttcggttgtctctgttggcggcctacgtggcccacagccgcagcggccgcgccgcgacaccgtggatcggcatgcgcagcgcctgccagctgtcgaccatgacgtggcgcacggcttccatctgccggcccagcacgcgcagcagcagcatcgactggccgctggtggccaggcaggtcacgccggcgcgcagctccggcgtataaggcagctgttcggccagggcttcggccagttcctgcgtcgcgccctcgcctaccgcccacagcgtgcccagcacattgagtccatcgaggccggccaccgcggtgcgcagcggcgactcggcttcaagatgcgattgctcgatccacaacgcacgctcgcccgtgccgacgcgggtatccagccacagcgcgccgcgggtccactgctcgccggatgcctgccggcccagcaccacagcatcccagccgatcgcgctgccgccgggcgcgacgtcgagcacggtcgaaatccgcgcacgggcgtcgtcgaagacgatgttctcctgcggcagccagtccagccgcgcgcctgcgcccaccgtcaggcgcacatgctgcgccgcctcgcggccgagcgacttgtaccacttggtggcacccggcgtggccagcacggcgtgcgcgccatcctcgaccgtcacgtcgatatccaggctgtcgccgcctgccacgccagccggcggatgcaggatcaccgcgtggcagatgccgccttccgggtacagcggcttctgcaccagcagcggcccctggtggcgccgctcggtcagcgcggtgcgttcgccgcgctgcgcaaagcgcagccgcagggtggcctgccatgcggcgggcacggtgagcgatgaaggaagatcgggatggcgcatggcaaggacagccggcggaggcgcgcgcgcaatggcgggagttgcaagcaatcatagcgcgctgcctggcttcgcgtaagcagcgtatgacccacaaatcccggcgctgccgcgcagccgccctacacggcgatcagctcccgcacgccgtcctgctccatgctggcgccggcaccccgcgccaccacttcgccgcggctcatcacgacatagtggtcggcaatatgccgcgcgaactcgtagtactgctcgaccagcagcaccgtcatgccgaactcgtcgaccagcaggcgcagcgcccggccgatgtcctggatgatggaaggctggatgccctcggtgggctcgtccaggatcagcaggcccggctcgctcatcagcgcgcgcccgatcgccagttgctgctgctggccgccggacaggtcgccgccgcggcgcaggcgcatggtgcgcagcaccgggaacaactggtagatccggtccggcacgccggacggccgcgcccggctggctgcgccgatcagcaggttttcttccaccgtcagccgcgggaagatctcccggccctgcggcacataggccagcccggcggacacgcgctcatacggagccttcttctccagcgcctgcccttgccattggatgctgccgctgcgcgtgggcaccacgcccatcaggcacttgagcagcgtactcttgcccacgccgttgcggcccagcagcgtggtcagcttgccggcgggcacgtcgaagctgacattgcgcaggatatggctgccgccatagaactggttcagtgcattgacctgcagcatgcttatcttcccaggtaggattcgatcacgcgctcatcgcgcttgacgctgtcgagcgtgccttcggccagcacgctgccctcggccagcaccgtgacctggccggcatcgcccgcgagcgcggcgacgaactccatgtcgtgctcgaccaccatcatcgagcagctgccgcgcaggccgttgagcagcgccgccagctgcatggtctcttcatcggtcatgccggccaccggctcgtccagcaacagcagctgcggctgctgcatcaacagcatgccgatctccaggcgctgcttctgcccgtgcgacagcagcccggcgggccggtaggcctctgcctccagtccggtcagcgccagcgtttcctcgatgcggcgatgcccctccgccgtcagccgcgcgcgcagcgacgaccaccagcgcttgtcggccttcatcgccagttccaggttctcccacaccgcgtgctgctcgaacaccgtgggcttctggaacttgcggccgatgccgacctgcgcgatgcgcggctcggtcatccgcatcaggtcgatggtctggcccaggaacacgcgcccgctgacattggcattgcgcggcccggtcttgccggtgatgacatccatcatcgtggtcttgccggcaccgttgggaccgatcacgcagcgcaactcgccatggtcgatcgacaaggtcagcttgttcagcgcgcggaagccgtcgaactgcaccgtcaggtcttccaggtacaggatcggcccgtgcgagacatcgatggtgccgggctcgacgatgcggcccaggccggtggcatcgccgctttcggcctggccgtgctggagtgcggcgttcatgcttcacctcccgtgcggcctgccacggcaggcgcggaaacagggtctgcagcggctgatggtgcggccgcgcgccgctcgcgcagccggttccacagcccggtcacgccatcgggcaggtacaaggtcaccagcacgaacatcgcgcccagcaggaacagccagtattcggcaaagtgggctgtgaacagggtcttggcaccattgaccaggaacgcgccgatcaccggtccgatcagcgtgccgcgcccgcccacggcgacccacaccgccatctcgatcgaattgccgggcgacatctcgccggggttgatgatgcccacctgcggcacgtacagcgcccccgcgatgccgcacagcaccgccgaaaaggtccacacgaagagcttgtagcccagcgggttgtagccggagaacatcacccgcatctcggcatcgcgcaccgcggtgaccacgcgcccgagcttggacgtgacgatgtagcggcaggcgatgaagcccgccagcagcgccaggaaggtcagcacgaacagcgccgtgcgcgtctgcggcgccgcaatcgcaaagccggcaatgcgcttgaagtccgtgaagccgttgttgccgccgaaaccggtctcgttgcggaagaacagcagcatcgccgcatacgtcatcgcctgcgtgatgatcgacaggtacacgcccttgatgcgcgagcggaaggcgaagaagccgaacagccacgccagcacgcctggcaccagcaccaccagcagcagcgcatagccgaggtgctcggtgccgtgccagaaccatggcagctccttccagtcgaggaacaccatgaagtccggcagttcgctcttgtacacgccctcgcgcccgatcgatcgcatcaggtacatgcccatggcatagccgcccagcgcgaagaacagcccgtggcccaggctcaggatgccgcagtagccccacaccaggtccagcgcgatcgccgccagcgcaaagcacatgatcttgccgaccagcgtcagcgcataagccgacaggtgcagcggatgcccctccggcaacaccagcgcgcacaccggcacgccgatgccgacgatcaccaccagcgccgcaagcaccagccagccgcgcggcgagaacagcgcctgccgctctggcaccgctagccggaacgcggtggcggaagaattcgattggactcgctgcatcatgcctccgcgctgcgccccttgagcgcgaaaagtccctgcggccgcttctggataaacagcacgatcagcaccaggacaaagatcttggccagcaccgcgccgtagaagggctcgatgaacttgttgatgatgcccagcccgaaggcgccgacgatggtgccggccagctgcccgacgccgcccagcaccaccaccatgaacgaatcgatgatgtaggcctggcccaggtcggggccgacattgccgatctgagacagcgcgcagccgcccagcccggcaatgccggcgccaaaggcaaaggcgtagctgtcgaccttccaggtgcgcacgccgacgcaggccgccatggtgcggttctgcgtggtggcgcgcacgaacagccccagccgcgtgcggttcagcaccgcccacgccaccgccaccaccgccagcgcgaacaggatgatgacgatgcggttgtacgggatcaccaggcccggcatccattcgatgccgccgctcatccacgccgggttggccacttccacgttctgcgcgccgaacagcgtgcgcaccgcctgcatcagcagcaggctcacgccgaaggtggccagcagcgtttccagcgggcggccgtacaggtggcgcagcaccagccgctcgagcacgaagcccaccagcgcggcggccaggaacgaggccggcagcgccgccggcaggtaccagtcgaacgcacccggcgcgtaggcgcggaacagcgactgcaccacgtaggtggcataggcgccgatcatcaggaattcaccgtgcgccatgttgatgacgccgatcaggccataagtgatggccagcccgagcgcggccagcagcagcacgctgcccaggctcaggccggcgaacaggttgccgatcagctcggcgcggcgctggtcgctgcgcagcgtgtccagcgcctgctgcgcggccaggcgcacgtcggcatcgggctcgcggtagttgccggcgctgtcgcgctccaccagcggcgccagcttctggcggctctgcgggttgctgtcgctgccgaggatgcggatggcttcaagcctcgcgtcatgcgctgcgggatcggccggctcggccagcaccaggttggcccagatcacgtccaggctggtgcgcagtccggcatcggcctcgttcttgcgggcggcctcgaccgcggcgcgcgaggcgctctcgggctggtcgcgcagcgtggcgatggcctgcgcgcgcaccgcgatatcgggcgactgcagcagcaggctgctggcggcgctgtcgaccagcgcgcgcaggctgttgttcagggtcagggattcgagctcgtcggctttcaccgcgaccggcttgcccgtgacagcatcgacggtcttgtcgccatcctggcgcaccatgccgaccgacggcgcatattgcagcgcgtcgtcctgcaaggccttcaggatcgggccggcctgttccggcggggccttggccagcgcggtcagcgccgcggtcttggcatcgaaatcgtcttcggccagcggcttcaggtcggcctgcgtcagcgccgcggcccacggcgcagccgccagcagcagcgccgccagcagggcgcgcagccatggcaggatggaaacggataagggattgcgcataggtgctggcgagttgcggaataagtgtttggggagaaggcaggtgtccatgacgaagcgagtgccatctggctggcaagcgccagccctctcccccagcccctctcccgcaagcgggagaggggagccaaccggcagcgggtggcccggcttacatcaccttgtccggcttgccttcgttacccgcgatgaacgggctccacggctgcgcgcgcaccgccttcggcgtcttccacaccaccgagaactggccgtcgcccttcacttcgccgatcatcaccggcttgtacaaatggtggttctcgcccatggtcagcgtgaagccgtccggtgccttgaaggtctggccgtacatggcggcgcgcaccttgttggtatcggtggtgccagccttcttcacggcctgcgcccacatatggatgcccacgtaggtggcttccatcgggtcgttggtcacacgcttgtcgccgccgggcaggttgttggccttgacccatgccgcccactgcttgcgaaaggcgtcgttctcggggttcttgaccgacatgaagtagttccatgcggccaggtggcccaccagtggcttggtatcgatgccgcgcagttcctcctcacccaccgagaacgccaccaccggcacgtccttggccttcagcccggcgttgccaagttccttgtagaacggcacgttggagtcgccgttgatggtggagatcaccgcggtcttgccgccctgcgagaacttcttgatattggcgacgatggtctggtagtcgctgtggccaaacggggtgtagacctcttcgatgtccttgtcggccacgcccttgctcttcaggaacgcgcgcaggatcttgttggtggtgcgcgggtagacgtagtccgtgcccagcaggaagaagcgcttggcgccgccgccttccttgctcatcaggtattccaccgccggaatggcctgctggttgggcgctgcaccggtgtagaagacgttcttcgacatctcttcgccttcatactgcaccgggtagaacagcagcgagttcagctcttcgtagaccggcagcacggatttgcgcgacaccgaggtccagcagccgaaggtcaccgcgaccttgtccttggtgatcagctggcgcgccttttccgcgaacagcggccagttcgaggcgggatccaccaccaccggctccagcttgcgccccagcacgccgccgctcttgttgatctcgtcgatggtcatcagcgccacgtccttcagcgacgtctccgaaatggccatggtgccggacagcgagtgcaggataccgaccttgatcggttccttggactgcgccatggccagcgggctggtaccgatcattgccgcggcggctatcgccgacagcttcagcatgtcacgtcgttgcatttgcagctcccgtttatggtgttagtcagggactacgctccccgggtgatgcttctgcaactagcgtgccatggaggcaggccgcctgatacccaccgcacccccggcagatggcgtgctggcgcggcgcgcaggcgctgccgccgcccgcgatcgcgcatccgcaccagagcagtgcgggcggcgcacgcaccactcccgtgcatctgcgcaattccgtgcgggcggcatgcgcaaggcaccaggcgatgcgcgtccccgcaccaaggccgggcaccacgccccaaggcaggcgacgggcaaaaaaaacggggccccttgcagggccccgctcttgatgccaggacgttggtccttacatcaccatcatgttggcattcaggttgtgcatgatccacagcgaacccgccaccacgatcaccaggatcagcgccgtgaacagcagcgcgatcacgttgctgcgctgctcggacgacgtgtccaggtgcaggaagtacttcaggtggaccaggatctggaccgcggccatgccgaggatgatccagaggatggtgcccttgtccatgctgccgtccatcacgagcttgaacgggatcacggtcaggatcacggccaggatgaagccgattgcgtacgacttgaagctggcgtgggtgtcatgacccgcgtgcgagtcgtgcgagtcgtgggcgccgtgcgccgccggtgcgttgtgttgtgccatcacagatgtcccatcaggtagaccacggtaaacacgccgatccagaccacgtccaggaagtgccagaacagcgacaggcacatcaggcgcttgctcagggtcggggtgatgcccttcttcgacagttgccacatcagcacgatcatccacagcatgccgctggcgacgtgcaggccgtgggtgccgaccagcgtgaagaacgacgacaggaaagcgctgcggcccgggccggcgccttcggcgatcaggtgatggaattcgttgatttccatcgccatgaacgccgcgcccagcaggaacgtgacgccgagccacacctgcacgcggctcaggctgcggttctgcagcgagatcatcgccatgccgtacgtgatcgaggagaacagcaggatgaaggtctccaccagcacatagttgagctcgaacagctccttcgccgacgggccgcctgccagttcgccgcgcagcacggcgaaggccgcgaacagtccggcgaagatgatgcagtcgctcatcaggtagatccagaagccatacaccgtattggcactggtatcgtggtgcgcatggtcatggccatgcgcgtcggctttggccggtgcgccggcctgcgcggggatgcggtctaggacttgagtcgacatggttctcaggcttgcgaagcaatgcgctgcagatggcgcgtttcgatctgctcgacctcggtggccggcacgtagtagtcgatatggtcgtcgttgctgcggtggataaacgcccacaccatgcccaccaggccaacgatggccatccaccagatatgccaggtcagggcaaagccgaacaccaggctgaaggcgccgatgatgaagcccgcgcccgtgttcttgggcatgtggatcttctcgtagccttcggtcggcagcgtctcgccacgggccttcatgtcggagaacgcgtccaggtcacgcaccaccggggtgtgcgcgaagttgtagaacggcggcggcgacgaggtggcccactccagggtacggccgccccacgggtcgccggtcacgtcggccagcttcttgcggtcgcggatcgacaccacgatctgcagcacctggaagaagatgcccagcgccacgaacaccacgcccacgacggccaggtacagccacggcgtccaggccgggttgtcggtgtggttcaggcggcgggtcatgcccatcaggcccagcacgtacagcggcatgaaggcgaagtagaagccgaccagccagcaccagaaggcgcacttgcccaggcgctcgttcagcgtgaagccgaacgccttcggccaccagtaggtgatgccggccaggtagccgaacagcacgccgccgatgatcacgttgtggaagtgggcgatcaggaacaggctgttgtgcagcacgaagtcagcggccggcacggccatcagcacgccggtcatgccgccgatcacgaaggtgatcatgaagcccagcgtccacagcaccggcgaggtcatctggacccggccgcggtacatggtgaacagccagttgaagatcttcaccccggtcgggatggagatgatcatggtggtgatgccgaagaacgcgttgacgttggcgcccgagcccatcgtgaagaagtggtgcagccacacgatgaacgacagcaccatgatcgcggcggtggcgtacaccatgcccttgtagccgaacagcttcttgcccgagaacgtggcgatcacttcagagaagatgccgaacgccggcaggatcaggatgtacacctcggggtggccccagatccagatcaggttcacgtacatcatggcgttgccgccaccgtcgttcgtgaagaagtgggtaccgacgtagcggtccaggcccagcagcgccagggtcacggtcagcaccgggaaagcggccacgatcagcacgttggtgcacagcgcggtccaggtgaacaccggcatgcgcatcagcgtcatgcccggcgcgcgcatgcgcaggatcgtcaccaggaagttcacgccggtcagcaaggtgcccaggcccgagatctgcaagctccagaggtagtagtccacccccacacccgggctgaagtccagtcccgacagcggcgggtaggccagccagccggtcttggcgaattcaccgacgcccagcgagacattgaccagcatggcgcccgacacgaacagccagaacgacagcgtgttcaggaacgggaacgccacgtcgcgcgcgccgatctgcagcggcacgaccagattcatcaggccggtcatcagcggcatggccacgaagaagatcatgatcacgccgtgggcggtgaagatctggtcgtaatgctcgggcggcagcacgccggtcgcgccattggtggcgagcgccagctgggtgcgcatcatgaccgcgtcggcgaagccgcgcagcagcatgatcagggcgaccaggcagtacatcacgccgatcttcttgtggtcgaccgaggtgaaccactcgttccagaggtagccccacttcttgaaataggtgatcgcgcctagcagcgcggcaccgcccagggcgacgccggccagaacgaccatgatgatcggctcatgaaacggaatcgccgacaaactcaacttgccaaacatcattgctcctaggattgcgcgcccagcgccttcacaggcgtggtcatcgacagctgctcttcaccgagggtgttgcgcgacgtgcagatcgggccgcccttgaacccgtcggcggcgagcgccgtgccgctgtggtccatgtacttgtgcaggatgttgtggaagagcttgtcttccaccttgccgtagtacgtgaccggctccttctcgctgggttgtgccagcgtcttgtagccttcaacccccagttcggtggacgaggcgcgaaccttggcgacccactggtcgaactcgtagttcgacatggcgaccgccttgaacttcatgcccgagaagccgccgccgctgtagttggcggatacgccgtcgtaagagccggcttcgttggcgatcaggtggagcttggtctccatccctgccatggcgtacacctggctgcccagttgcgggatgaagaacgaattcatgatcgaatccgaggtgatcttgaagttcaccggggtgtcgaccgggaaggcgatctggttgaccgtggcgatcttcagttccggatagatgaacagccacttccagttcagcgccaccacctcgacggtgacgggcttcttgctggattcgagcggcttgtacgggtccaggtcgtgcgaggacttccaggtgatgatgcccagcgcaatgatgatcaggcaggggatcagccacaccaccacttcgatcgccgtggagtgcgaccagtccggctcatagcgcgccgaggtattggacgcgcggtacttccaggcgaacaccagcgtgagcacgatcaccggcagcaccaccagcagcatgagccaggttgcaatcaggatgatgttcttgatgtcgacgccgacctgccctttcgggtcgagcagcgtcatgttgcagccggcgagcaggagcaggccaaggcaaggcaggaaccgcgtccaacgcggcagtatgggtttcttcatgtcacgactggtttggttacaccgcgcttcgggcaaaagcgcggctaaaccgcctgatgctcgcgcaagaggcgtggggctgagggaaaaccggaaggacgtgtccttagctggcgttgcggtcgggcggcggatcgaacgccgggggaccatgcggccttgcaacgccatgaacacggaaggacaactgactgcgtgcgctgcaggccctgtaggaccttgccggcgctgcggcacctggccgaaaccgcgaacggtcccggctcagtacggcggccgggtagcgttggaatacgaggtttttgcacttcccgacggacttgccttcatggcaagcgcggttttcggccggggagcgcaacacgtaaaacatcgtgggcgcgactgtaccgcaacgcaacattaggggtaaacccaacggcacagaacacactgttcagcagaacggacaatcgacgcacaaatccgcgaagcagcatttgacaggcatcaacgtcacaaatcggttcctaaaaatgcagaaagccgcgcatcaggcggcctccaggggcgcgacatgcctgtgtggcatattgtcgcaccgcgtcaaaactgcgtatccgtcacccgtagcggcgcgtgatcgactcggcgacacagaccggacggtcgctgccttcgcgctccaccgtgacttcccaggtcgactgtgcgccaaccagttcgggcgacttcggcagcggatcgagacgctcgaccttcagcagcttgatgcgcgcgcgcagcttgctgcccaccggcacgggtgccgtgaagcgcacgcggttcaggccgtagttaacgccgatcttcgacggcatgtgcagcgcgttgtgcatgaacttgggcagcagcgacagcgtcaggaagccgtgcgcgatcgggccgccatagggcgactccttcttcgcgcgctccacgtcgatgtgaatccactggtggtcgccggtggcatcggcaaactggttgacctgctgctgggtcacctcgatccagtcgctgaccgcgacctcctggccctgcaggccttccagttcttccagcgatgcgatggtacgcatgtcgatagtctcctcttgacgataaagtgttcttaagcggggcggcggccgtacatgcccatgcccttgacggtgcagaccagttcgccgcgctggttggtggcttcccactgggtgtggaccacgccgcggtccggcttggactgcgacggccgggtatcgagcacattcagcacgacggtgagcgtgtcgccggcgtagacgggcttgagccagcggatctcgtccacgccaggcgagcccatgctggccgacttgccggtggtgctcagcaccagcagccgcatcatgatcgagcacgtcatccagccgctcgagatcacgccgccatagatgctcctggcagcggcttccttgtcgatatggaacggctgcggatcgtactggcgggcaaaggccaggatctcttcctcggtgacgaggtacgaacccagttcgcggcggctgccgacttcaaagtcctcgaaatacagcatcggttgtctctctgtagtgattggcgccatggcaccaagtttgctcaggcaatgatcgcatggccgccgggggccggcgtccgtatttgccgaacccgcccctaacggtccccaaagaaaaaaaccgcgcctggactacagcgcggttttgattggactggcaggatcaggcagcttcctggaaccccggctgggcggcgaacctgcccaggtggtgatccacgtcgccgaaggtggtgttgatcagcgtcagccgcttgaacatgtgcgcggccggcagttcgttggtcacgcccatgccgccgtggatctgcactgcctcctggccaaccgtgcgcgctgcctgccccacgcgcgccttggcggcggagacatagcggcggcgctcttccggcgttacttcttcgaagcgtgccgcggccagcagcgtgatcgagcgcgactgctcggcgtggatgaacatctccaccatgcggtgctgcagcgcctggaagcgcgcgatcggcacgccgaactgctggcgcgtcttggcgtattccagcgtggcggcattgagcgtatccatcacgcccacggcctcggcgcacagcagcacggcagcgtagtcggccacttgctcgatcaccgggaaggccttgccggcttcgcccagcagttgcgcgggggcatcctggaaggtgatgtcggccgcgcgcaggttgtcgatggtgcggtagtccttgatgctgacgccggcgcccctggcatccaccaggaacagcgagatgccgtcctggtcggcttcggcaccgctgctgcgggccgacacgatcagcttgtcggcctggccgccgtgcagcaccacggtcttgcggccgttgagcttgccgtcgcgggcggtgacgcgcacgttgttcagttcatagcgcgcctgcggctcgttgaaggccacggtcagcttcagttcgccgccggcgacctgttccagcagtgcatcctggccaccggccaggcccagggcgtaggcgcccaccaccgtggccaggtacggctccacgatcaggcctcggcccagctcctgctgcaccaccatcatgtccagggccttgcccgcgaaaccgccctgcgcttccggcaccggcagcgcggtcaggccaagctcgaccagcgagccccaggcggcgtcgccatagccggcggcgctttcgtagttctgcttgcgggactcgaagccgtagtccttgtcgatgaaacggcggacggcgtcggccagctgcttctgttcgtcgctgagattgaagttcatgttgcgtgtctcctcacagccccagaatcatctggctgatgatgttcttctgaatttcgttggacccgccatagatggaggtcttgcgatagttgaagtagtacgcggccagcggcgcggcgtcgtcgtagccggtcacggcgtgctcggtctcgcactccaggtaggcggtgtcgaacggctgcgcgtacgggccgacggcctcgaccatcagctcggtcagcagctgctggatctcggtgcccttgatcttgagcatcgaggcctcggggccggggcccttgcctgccgcttcgctcgagaccacgcgcagcacggtgatttccagcgccatcagctcgatttccagcgcggccaccttggcgccgaacaccgggtcttccagcagcggcttgccgttcttctgctgctggcgcgccacgcgcttgaggaagcccagctcgcgcttggagttgcccacgcgggcgatcccggtgcgctcgtggcccagcaggtacttggcgtaggtccagcccttgttctcttcgccgacgcggttctcgaccggcacctcgacgttgtcgaagaagacttcgttcacctcatgctcttcgtcgagcatgatgatcgggcgcacggtgatgcccggggtcttcatgtcgatcagcaggaacgagatgccctcctgcttcttggcttcggggtcggtgcgcaccaggcagaagatcatgtcggcgtgctggccgagcgtggtccaggtcttctggccgttgacgatgtagtgcttgccgtccgaagtcagctcggcacgggtcttcagcgaggccaggtccgagcccgagcccggctccgaatagccctggcaccaccagtcggtgcagtccaggatgcgcggcaggtagtacgacttttgctcttcgctgccgtacttcatgatcaccggcgcgaccatcgccacaccgaacggcagcacgccgggcgcgccgacgcgggcgttctcttcatcccagatatggcgctgggtggcgttccagccggtgccgccgtactggacgggccagtgcggtgccgaccagcccttgccggccagggtcttgtgccagcgcaccaggtcgtcgcggttcggacggcggtggttgagaatcttgctgcggatgtccgccggcaagttggcttcgagccagctacgcacttcctcgcggaaggcgttgtcggacgccgagtagttgagatccatgcccgtctccagtggtgccggcttggcgtggggccgccggcggtttgttctgcctgcacgtcaagcgccgacagcaaacgggcacaagacgcaattcagtgagccgtctgcttcagcgcatccggcaccacgagcgggaaagtctcgatgccctcttcggccagcgcctgcacctcctccgccgaggccgaaccgcgaatgccgcgttccggcgcctcgtcatagtgcatgcgccttgcctcttcggcaaagcgatcgccaacatcctcggtctgtgccagcacctgcttcactgccttcatatagagcgcttgcagtgtctccggtgcggcagccggctgcgccggcctggcgctgccttcgcgcgcggtcgcgcccgacaggttcaggcgcggcgcgctgggcagccgcgtcacggcgtggtcgccacagaccgggcattggacgaggtcacgcgagatttgcgactgcgcatcttcttccgaggcaaaccagccctcgaaaccatggtcatgcgcgcagcgcaggtcgagcaccttcatgatctttccagcccgtcaaaagctatattatccgcgaatcgaaattttgtgaacggtcgtgctaaattttttagaacgaccgttcgggaacaaccgcatggcgcagaatccacgcggctcactactcactatacggcgtaatgcggcagcggctgttcgcccggttgccaggcacccgagatcactttttccagccagaatgcgccgatgatggtctttacatcggtgatgcggccgctgcggacccaatcgatcacctgccccaccggcgtgatgaaggtctcgatgaactcgccgtcgtcgagctgcgcctcgccatgcgtcaggtcgcgcgccaggaagatgtcgatgaactcggtggaatacgagataaccgggtggatgcgcgtcaggtagtcccagcgcgccgcgctgtagccggtctcctccagcagttcgcgttcgccgcagcgctgcgcgccctcttccggatcaagcttgccggcggggaattccagcatcacttcgccgatcggatagcggaactggcgctccatcagcacggtgccgtcgctgaacagcgggatcatcatcaccgcgcccggatggaccacgtactcgcgcccggtctgcttgccgtccggcagcctgacgatatcttgcttgagggtgaggaacttgccgcgatggaccgtggccgaggcgacgcacacttccttcagtgcgtcgtcgttcccggcgggttcagcggtaggcggggtgccgcgttggatcttgtcggtcatggacgctccggatcaggcagggcccggcgccgacaagaccggcttcaggccgtgcggtgtttgacgaggtattgccaggtgaagcccgggaaggcaaacaccagcatcatgcacgcggtaatggcataaaactgccagccctgcgggaaggcgttgccaaggctggcctccaccgcaaagccggcggcgcccgccaccgcgaaccatacgatcagttccagcaggcgcagccacagcggcttgcgcgcccgccgcagcgggatcagcacgaacaggcgctggttcacaaacggcaggttcgcactgatcagtgccagcaggatgacaaaccagccgcttgcggatgcgctcatggcgtgtggcggatcaggaacccagggtcgagcggatggcctggtagcacaggttcatcagcgcggccgggaaaatacccagcaggatcaccgcggcgccgttcacgctcagcatcgagcgcaggccaaaggttgcttccagctcttcttcagcagcgggcgcatcgaagtacatcagcttgacgatacgcaggtaatagaacgcgccgatcagcgagaacagcacggccaccacggccagccaggtcatgcccgacttgaccaccgcatccagcacggccagcttggcatagaagcccacggtcggcggaatgccggccagcgagaacatcatcaccagcatcaggaacgcgaaccacgggttgcggcgcgacatgcccctcaggtcttccagggtctcggcctcgaaacccttgttcgtgcgcagcaggatgatgccgaaagtgcccagcgtggtcagcaggtaggtcaccgagtagaacatcgccgagctgtacgcatcggcggcgccgtcagccttgttggcgaccacgcccgacagcaggcccagcagcacgaagcccatgtgcgagatggtcgagtacgccagcatccgcttcaggttgctctgcacgatggcggtcaggttgccgatggccagcgagatgatcgacagcaccaccagcatcatctgccagtcattggccagcggcagcaggccttccaccagcacgcggataaacagcgcaaaagcagcaaccttcgggccgccggcgatcagcagcgtcaccgcggtcggcgaaccctggtagatgtccgggatccacatgtggaacggcgcggcacccagcttgaacgacaggccggcgacgataaagaccacgccaaaggccagcatggtggtgttgacgcggcccgactcgaccacgcggaacacttcgcccaggttcagcgaaccggtggcgccatacatcatcgagatgccgtacagcaggaagcccgaagccagcgcgcccagcacgaagtacttcatcgccgattccgaggtcacgcgcgattcgcggcgcagtgccaccagtgcgtacgacgacagcgacagcagctccaggcccaggtacagggtcaggaagttgttgccggtgatcatcacgatctggccgcccagcgtgaacagcgcgagctggtagaactcgccggcaaacatgtcgcgatccgccagatagcggcgcgtgtagaccagtgtcacgaacaggccggcagagcagaacgcggacagcacgtttgccatcggatcgatcacgaccaggttggcgaacgcgtagtgcgtctcgccggcggcggcattcaggccgaaccagacggtcagcgccagcgtggccagcagcgacagcggatatgccacgctttgcttgcccttgccacgtgcaaggtcgatccagttgaccgcgccgatggcgatcgccaggaagatgatcggcgccacggggccgagtgtcgaggacgtttgcatgttgatttctctccccgattacagcttggactgtgccgcgtgggacagcaggttcaccacggacgcgtgcatcacgtcggtaaagggcttcgggtgcaggcccatgtacagcgtcatgatggccagcaggccgagcatgacgaactcacgcttgttcaggtcgaccagctcgcgcacgtgctggtggacgatgtcgccgaagatcacgcgcttgaccatccacagcgagtaggcggcgccgaagatcagggcggtggcggccagcaggccgatccagaagtcgaacttgaccgcgcccaggatcaccatgaattcgccgacgaagcccgaggtggccggcaggccgcagttggccatcgcgaagaacactgccagcgcggcgaacttgggcatggtgttgaccacgccgccgtagtcggcgatctggcgcgagtgcacgcggtcgtacagcacgccgatgcaaaggaacatcgcgccggagataaagccgtgcgagatcatctgcacgatgccgccttccacgccgatgtcgctgaagatgaagaagcccagcgtgacgaagcccatgtgggcgatcgacgagtacgccaccagcttcttcatgtcggcctgcaccagggccaccaggccgatgtagatcaccgcgatcagcgagatggtgatgatgaacggggccaggtagtggctggcgtcaggcgcgatcggcagcgagaaccgcaggaaaccgtaggcgcccagcttcagcatgatggcggccagcaccaccgaaccgccggtcggcgcttccacgtgggcgtccggcagccaggtgtgtaccggccacatcggcaccttgaccgcgaaggcgacgaagaaggcgatgaacagcgcgatctgctcgttcatcgacagcttggcctggtgccattgcaggatgtcgaaggtaccggtcttgttgtacaggtacagcagcgcgatcagcgtcagcagcgagcccgccagcgtgtacaggaagaacttgaacgcggcatagacgcggttcgggccgccccagacaccgatgatgatgtacatcgggatcagcgtggcttcgaagaacacgtagaacagcatgccgtccagcgtgcagaacacgccgaccatcaggcccgacaggatcaggaacgaggccatgtattcggccacacgctcggtgatcacttcccaggccgagatcaccacgatcaccgtgatgaaggcggtcagcaccacgaaccacatcgagatgccgtcaacacccagcaggtagttgatattgaagcgttcgatccagctcgccttttcgacgaactgcatggccgcgctggcgcggtcgaagccgaagaccagcggcagcgtgacgacaaagctggcgatcgagccgaacagcgacatccaccggacaaagccagggctgcggtccgagccgaaggccaggatcagcaggccgaaaaagacaggcagccagattgagaaagacagaaccatttctatgttttccttacttggtgcctatcacttggtgccgatcacgcccgtgaccgtcagcgtcagcagcaccagcatgccgacgatcatcgcgaacgcgtagtggtagatatagcccgactgcaggtagcggcttgccgaagcaaacgaagccaccaggcgcgccgcgccgttgacgaacaggccgtcgatcaggctctggtcgccgcccttccacaggccggtaccgagcaggcgtgcgccgcgggcgaacacggcctggttgatggcgtccatgtagtacttgttgtccagcagcttgtagagacccgagaagcggttcgcgatggcttcagggatatccgggcgcttcatatagaagaaccaggacagcaccacaccggcgacggccagccacagcacgggcgtggtcagcgagtggatcgccattgccacccagccgtggaacgcttccttgagctcggccatggcgtggtggttctcgccgacgaagatcacatccttgaacgcgatgccgttcttgaagaagttgccgaacagcatcggctcgatcgcgatcgcaccgacgatcaccgacgggatcgccagcagcaccagcggcagcgtcaccacccacggcgactcgtgcggcttctcgccggcggccaggccatggtggtggtcgtgcgagacctcttcgtcctcatggtcgccttcatgatgctggtgggcatggttctggccccagcgctccttgccatggaagaccaggaagtacatgcggaacgagtagaacgcggtgacgaacacgcccgccagcacggcgaagtaggcaaagcccgaaccggcgatatgcgactcggccacggcctcgatgatcgagtccttggagtagaagcccgcgaagaacggcgtgccaatcagcgccagcgaacccaccagcgaggtgatccaggtgagcggcatgtacttgcgcaggccgcccatgttgcggatgtcctggtcgtggtgcatgccgatgatgaccgagcccgcgcccaggaacagcagtgccttgaagaacgcgtgcgtcatcaggtggaacacggccaccgagtatgccgaagcgcccagcgccacggtcatgtagcccagctgcgacagggtcgagtaagcgaccacgcgcttgatgtcattctggatgatgcccaggaagcccatgaacagcgccgtgatggcaccgatcaccagcacgaaggacagcgccgtatccgacagctcgaacagcggcgacatgcgtgccaccatgaagatgccggcggtcaccatcgttgccgcgtggatcagcgccgagatcggggtcgggccttccatcgagtcaggcagccagacgtgcagcgggaactgcgccgacttgcccatcgcgccgatgaacaggcagatgcaggccacggtgatcatgagccagtcggtgcccgggaagatcacggtcgccagctggtcgcgcgcggcgaatacttcggtgtagttcatgctgccggcataggccagcagcaggccgatgcccaggataaagccgaagtcgccgacgcggttgaccaggaacgccttcaggttggcgaagatcgccgtcgggcgggtgtaccagaagccgatcagcaggtacgacaccaggcccaccgcttcccagccgaagaacagctgcaggaagttgttgctcatcaccagcatcagcatcgagaaggtgaacagcgagatgtaggcgaagaagcggttgtagccggggtccccgtccatgtagccgacggtgtagatgtgcaccatcagcgagacaaaggtaaccaccaccatcatcatcgcggtcagcgagtcgaccaggaagccgacctccatcttcaggctgccgatggccatccactcatagacggtgccgttgtagccggcgccgttcatgacgtcgagcagcaccatcaccgacagcacgcaggcaatggccacgcccagaatcgtcgaggtgtgggccaccatccggccgccgcgcgactccgaggaaaacaggtcaaagaacttggtaccgaacaggccggcgatcgcggagccgactagcggcgccagcgggatcgcaagcagcaggttggggttgagcgtggttgccataggacgcttagtggtgtgcggtcggtgagtcttgggtatctgcgtagtgcgccacggatcagcccttgagggtgtccatgtcgtccacgttgatcgtatccaggttgcggaacagcacaaccaggatggcgagaccgattgccgactcggcggcggccaccgtgaggatgaagaaaacgaaaacctgaccagccaggtcgcccaggtaatgcgagaaggcgacgaagttgatgttcaccgcaagcagcatcagttcgatcgccatcagcagcacgatcacgttcttgcggttcaggaagatgccgacgatgctgatcgcaaacaggatcgcaccgagcacgaggaaatgagcgagagagagcacagcgatttctccgggctttagttcttattggcggcagccgcggcttccgtctgctgggtctggccttcggactgcatcggcaccaggcgcacgcgctcgtcgcggcgggtgcgcagctgcgccgacacgtcctgggccttgacgtccttgcggcggcgcagggtcagcgccacggcggcgatgatcgccaccagcaggatgatgccggccacttcgaaggcgtagatatagtcggtgtagatcagcttgccgagcgcggcggtgttcgagtagcccgggtcctgcgaaccgttggtggccaccggcgtggtggtgccgataaagttgcgcaccagcacgatcgccatctcggcgatgatcagcgcgcccaccaccgaggccatcggcacgtaggtccagaagtcccgccgcaggtgctcgatgtcgatgtcgatcatcatcaccacgaacaggaacagcaccatcaccgcgccgacatagaccagcaccagcaggatggcgaggaattccgccttgagcagcatccagatcgccgccgccgtgaagaacgacagcacgaggaacagtgcggaatgcaccgggttcttcgcagtgatgactttcagtgcggagagcaccagcaccagcgcaaagacgtagaagatggtggtcgtgagttccatggtccctatcggatcctctctgggccgtccggcacaagccaccccctcgggtggcccgctcctgcggcatccttgcattggccccttgcattgcagggaccgcattcaattcggtggcggcggctgccaggtctgctgcttgcggcagccgcgaaccggtcgttacttctgtcgctgcttcggcttagcgatactttgcgtcggcagccttcgctgcggcgatctgcggctcgtagcggtcgcccactgccagcagcatgtccttggtgaagtacaggtcgccgcgcttctcgccgtggtactccaggatctgcgtttccacgatggcgtcgaccgggcaggcctcttcgcagaaaccgcagaagatgcacttggtcaggtcgatgtcatagcgggtcgtgcggcgcgtgccgtcggcgcgcgcgtcggactcgatcgtgatggccagcgccgggcacaccgcctcgcacagcttgcaggcgatgcagcgctcttccccgttggggtagcggcgcagcgcgtgcagaccgcggaagcgcggcgagatcggcgttttctcttccgggaactggacggtgatcttgcgcgcgaagagatagcggccggtcagggccatgcccttgaagagttccttcaggagcaggctgttgaagaagtccttgatggcgagcagcatgatgcttcctagtatttccacacggcgcgcgccccggcgcgcaccgtcgtttggccgttcagtgccagatgttccagggcgacttgatccagatcgccacgatgatcagccacgccaccgtcagggggatgaacaccttccagcccaggcgcatgatctggtcatagcggtagcgcgggaacgaggcacggatccagatgaagacggacagcagcaggaataccttgatcaccagccagaagaagcccgggatcgcgttggtcagcacgctgtcgatcgggggcgcccagccgcccaggaacatcagcgcggtcatcgtcgagatgatgatcatgttgatgtactcggccaggaagaacagcgcgaagcccatgcccgaatactcgatcatgtggccggccacgatttccgactcgccttccaccacgtcgaacgggtggcggttggtttcggccacgcccgagatgaagtagacgccgaacatcggcagcagcggcagccagttccacgacaggatgttgatgcccatgtcggcaaagtagccggtgttctggccgttgacgatggccgacaggttcaggctgccggcaaccatcagcaccgtcaccagcgcaaagcccatcgcgatttcatacgacaccatctgggccgcggcacgcatggcgccgatgaaggcgtacttggagttcgaggcccagcctgccaggatcacgccgtacacgcccaccgagctgatcgccatcacgtacagcaggccggcgttcacatccgccagcaccacttcagcctggaacggaatcacggcccagaccgccacggcgggcatcagcaccatcagcggggcaatcaggtacatgccccggctgacctgcgtgggcatcatgacttccttgagcagcagcttcagcacgtcggcaatcggctgcagcaggcccagcggacccacgcggttcgggccgatacggacgtgcatccagccgatcagcttgcgctcccacaggatcaggtaagccacgcacagcagcagcggcaccacgatgatcacggcgcgaatcaggatccacagcggcgtccagtaggcacccagcaggccctgtccttgcgaggtaatccagtcaatcatgtcttgttctcgctcttgttcttacgccgtggccacggtgccggtggccggcgccaggtcaatggccttctctacggtgaccgt
